United States Patent Application Publication US 2026/0357256 A1 - sequence listing, part 8

SEQ ID NO: 9 - DNA, 58617616 bp, Homo sapiens (residues 15,197,162-17,368,184 of 58,617,616)
  source 1..58617616: mol_type = genomic DNA
acctacctcatggggggctttacatgtgacctcaggtggccaagaactgtgaagctgggattactgggcccattttgcagaccatgacactgagatgtaaagagtttaattcctagccggtcagcaacatgatgtgggacttgaacccatgccaagaagagtgcagagcccctgctcagtttccaatggggaaacacgagaggttgcccaagccacacacatgtaggaagtggtagagacatccatggtgaacacagaggcagagggagaagacaaatcgcccctcccccccgcccccacacacagggcccactggtggctctgagccaggcactcacaggcaggcagcctcccgggagggcagctgggtgcaacgacctccatttgcacacgggcttccgtccaggcaagggggggctgtgtgggggtgaaggaaggtggaggatcagccaggtgcccaggaaccccaggcccaagtgacaaaccccctccctccctccaccaggcaacagctgcatggggatgggggcgtctctgcgggtgcagggagtccccccatccacagttcccacgccccccccccccccgccccagccccagctgttgaggctgcagctgtccctgccagctcgagccctgggaaccacaaagcaggggaaggcaggaggaggggctgtcttatgccagatgtgggggctcgggaagctgccagagctaagatgtgcagaatggggtgtgctgagacaggaagtaagggtgctgagtgttacagggaggtctggggcttcatgcccaggttcaggggtaatagaaggggaaggggcaggggatcctagggccacgggtcttcctttccctgatgggcatctactccagccaggcaggcctgcgtggtgctcttgggagagggaccaaggcatgtacccacgagtgagcacagcatctccagaagcagccagcgctgggcgttgctggaatagggtgtgtgttgaagggaggggcaactggcacaaggcatgtgctgccctgtccaacatcgccatccctaagggctgtgtccctctagggtgtggcatagtctaactgtcctgccagaagggtccagggtgtggctgggtctgagctagtggagaactgtgtgcatgcgatcaggtgtggggacacagtgcgtgtgtccatgcatgctcttgtcagagagagggtgatggagagaggaaggaagatcgagaaaaacacaaagacgtgagaatgaactagaagcagatagaccaggagaagacagagaaggacagaaagaaatagaaagcggccaggcatggtggctcacgcctctaatcccaacactttgggaggccgaggctggtggatcacctgaggtcaggagttcgagaccagcctggccaacacagtgaaacccagtctgttctaaaaatataaaacttagctgggcatggtagcaggtgcctgtaatcctagctactcaggaggctgaggcaggagaatcgcttgaacccaggagccagaggttccagtgagccgagatcacgccattgcactccaccctgggcaacaagagccaaactccatctccaaaaaaaaattagctgggtgtggtggcgcacgcctgtagtcccagctactcgggaggctgaggcaggagaatcgcttgaacctgggaagcggaggttgcagtgacccgagattgcgccactgcatgccagcctggcaacagagtgagactgtctcaaaaaaaaaaaagagagagagaaggacagaaagaaatagaaaacaagagggtgagttacagaatctgtcgagctgaacctgagcatgggcctacatagtatatgccccttcctcacaggacaagccgactggacaccatcacccacaccaggacctgtgggtgttcgtgaactcacactgtgggtcccataacatgggctatgggccaccctgagctgtaggcaatgtgagccacatgtgtgtgcgtgcacgggcttgtgtgtctgtatgtggatttgggcatgcatctattgtgtctcagttgcagctacatgtgagtctatctgtacatgcatgtcagcgtgggtgtgcccgtgtgtgtatgagctgcacacccatacgggaatgcacagatgtgtgtgctgtctgtatgcaggttgtgtctgttgtgcgtctgtgtatgtgaaccgtgtaaatgggtgtacagctgtgtgttggtgtgacctgtgtgtgcaccgctgtgtctgtgtatgggttggctgtgtctgtccatctgcatgtgtgagctgggtgtaagcatgtccttgagtcttcatctatgtgctgtctgagtgtgtgcaggcagcgtgtgtgccacacctgtgtgatcatatttgtgtgtgtatgtatgtcaatgtgtgagctgtgtgcgtgcagctgggtgtgtctttcctgagccaggtgtgcaagtctgcgagtgtgctgtgtgtgtgcaggtttgcatctctgttacgtgacctagagctatgtgtgccagcgagtgtgtcacaggccatgtgtgtgcgccgctggtccggcggaggcggcggctcctgcctggtcctgccccgtccgggccccggggctgggctggggaggccgttcactcccgaaacccccaccccgcccagcgccaagccccacactggcgtctgggacccctggccaggggccttggcccgcgcccctcccccgcccaccaggcctcccgtagcggtgaggggggtgcccccgcagccccctccccggcccagccgcgggtcccgctttgtctggcaaagaaagcgcgaggccggccggagggagggggtgtctagacggcgcggccattgtcccgagcgggggaggggagggaggagaggaggaggggcgggggcccctggccggctggggaggggctctggccgcggggagggggcgctggagccgaaggggagcacgtgggccctcgccccttcccctccccgcgcaggggcggggtcccagggcctccgggtccccgcggccagaggagagaggcgggctgcgggcgggggagggggcgcgcgcgccgccgaggctccggctcggaatccggctccgggtcttgctgcgcgccggcctgggaagttttctccgagttcagagctcccagaacttcgcgccccctccccaccccccgcctggcccagcccgcccggggtgtcgggggcggggtgggggggcttttgtgcgagaggtccccggcctagaagtacctgggcccccaatcataacctacccaggactccaggcgtgagttggatggggacgagtcccgaactctgtacgcacccccccacctcgagtccctgatccccgcacctcgagctcccagtctcggactcctgggtcccttcatcttcagctctaatcgctcaagggtccctgttccttgggcctctggggtcctccccattctgaatctctgggtcctccaggactggcatgaagcccggggctcctgcgccccttccccgaccctggttcctgcctcccatgaacccccgccagccccggccttgggggttcttgcactccccctctgccgccctcgtcccatccgccaggtcccggcccctcacctgcagcccccggccccgctagcagcagcagcaggggcagcgcccgcacgggtggcggtggcggtggcggcgacatcgggcgacggcggcggcggcggccacgggcccccggccccatggcggccggccgcgaccctcccctcctccctccttccctgggctccgggcgcgtcccgggccagcctccgcgccgccaacttcgccgaagtgaggcggccgggccgccccgcccccagccctcgaaggctcgccccgccccggggccggcccagcgcgcccccgccccccgcccggcctcccggggtccctgcccaccctccacccgcacagcctgggacgcgcggaccctcggaaacccaggccgagcatgcagtgagacgcgggcagaacccggagtggcgggcacacccaacctcgtgaacgcccacgcaccccatccccatcccccagtacacacccagagccggacacctctggagccgggacaaaaaacacagcctcccagaaactctggaaactgaggccagtcacgtcctgagaggctcatggacccacagccacggacgcacaaatgcaagcccatgcaccaagcttccccaggactctgatctaaaacattcacaaacctaaaagtcggaccgggcgcggtggctccggcctgtaatcccagcactttgagaggcagaggtggatggatcacttgaggtcaagagttggagaccagcctggccaacatggtgaaacccggactctactgaaaatacaaaaattagctgagcgtggtggcgcacgcctgtagtcccagctattcgagaggctgaagcaggaaaatcgcttcaacccaggaggctgaggttgcacttagccgaaatcgtaccactgcgctccagcctgggcaacagagtaagaccctgtctcaaacaaaacaaacaaacaaaaaaccgctaaaactcactcagccaggccaggagcctaggactacatttgcagcctcagacctcagacacgtactaggagtcacatgcatgtgtgtgtgttcacacatgcacacacaaactcttcttgctctcagccctcccagaaagcaacccacttcctctgtgactctcaaagggtcaccccagccccctagtcccacccccataccccacacagctttgggcctcagcctatctggctcaatttgattaattctcttttctttttttttttttttttgagacagcgtgtcgctctgtcacccaggctggagtgcagtgtccctatcttggctcactgcaagctctacctcccaggttcaagcgattctccttcctcagcccccacccccacaatctgccaagtagctgggattagaggtgtgcgccaccatacgtggctaattttttctgggtttttgtttacttgtttgtttgtttttgagacggagtctcgctctgttgcccaggctgaagtgcagtggcatgatctccgctcactgcaagttccgcctcctgggttcacaccattctcctgcctcagccgtccgagtagctgggactacaggcaactggcaccatgctctgctaattttttttttgtatttttagtagagacggggtttcaccgtgtcagccaggatggtctcgatctcctgacctcgtgatctgcctgcctcagcctcccaaagtgttgggattacaggcgtgagccaccgcgcccagcttctatttttttagtagagactgggttttgccatgttggccaggctggtctcgaactcctgacttcaagtgatccgcccgcctcagcctcccaaagtgctgggattacaggcgtgagccaccacgcccagccttgatcaattgccttttcccaaatcagtcatgctgcacaggcttcctgcagctccctctgttcctgtggaaagaatggggaccctgagaggcctggagcccagccctggaggaacttccagtctggggaagaaaaagctagacgcacacacacccagtgtggagggctcagggctgggccagagaaaggcatggaatctgggaagggcctggggtacacgggtggtgggtgaggactttgcctgggagggttatttatttgttcattcatgtattcaacaagtatggctaaggctccagccctgtatcacactctgttctatggactgggggtgcaccctggagggcgtccaagaggacgtccagtggggcttggccctgaaagttgagctggagggaagtcatcccagcagagggactggcccatgccaacaggaagggacagagttggaagggaacgtgtacaggccagaggttaagaggagaaaggagccatgcttactccttggtatctggcttggtgataaggatgctggaagaaggaatgggttgggtggaggagagatgctgggtttgagggggtcacctacaaggcaggtatggctgagcatgggagaaccattctggtaggagatagtcacatgggtatcccagaaatcttcagacaatttttttttttagacaaagtccctctgtcacccagactggagtgcagtggcgcgcgacctcggctcactgcaacctctgcctcccgggttcaactgattctcctgcctcagcctcccaagtagctgggattacaggcacacaccaccatgcctggctttgtatttttagtagagacagggtttcactatgtaggctaggctagtctcaaactcttgaactcaggtgatctaccctcctctgcctcccaaagtgctgggattacaggcatgagccaccacgccgggccaattttttttttttttttttttttttttgagatggagttttgctcttgttgccccggctggagtataatggcgcaatctcggctcaccacaacctctgcctcctgggttcaagtgattctcctgcctcagcttcccgagtaactgggattacaggcatgtgccaccatgtgtggctaattttgtgtttttagtagagacagagtttctccatgttggtcaggctggtctccaactcccgacctcaggtgatccacctgcctcagcctcccaaagtgctgggattacaggcatgagccaccacttccggactctttttttcttaagaccaagtctcggtctgtggcccaggctggagtgcagtggtgccatctcggctcactacaacctccattcctgagttcaagcgattctcctgcctcagttccccccgccaccccaagtaggtggaactacaggcccacaccaccatgcccggctaatttttgtgtctttggtagagacagggtttcaccatgttgtccaggctggtctcgaactcctgacctcaagtgatctacccacctcagcctcccaaagtgctggaattacaggcgtgagccgccatgcctggccacagtttttttaactttttatttgaaaataatttaagccgggcgcggtggctcatgcctgtaatcccagctctcagggaggcaagaggcgggaggatagcttgagcccagaagttcaagacctgcctgggcaatatagtgagaccccattctccacaaaaaggaaaaaaaaaaaaagacgaaaataatttaaaacacacaaagttgcatgccgggcgtggtggctcatgtctgtaatcccagcactttgggaggctgaggcaggaggattgtttgaggccaggagttcaaaatcagtctgggcaacatagcaagacctccatctctataaaaaattaaaataaaattaagagggtgtagtggtgagcgcctgtagtcccagctacttgggaggctgaagtgggaggatcacttgagcctggatgtcactgcacttcagcctgggcaacagagcaagaaccaacttcaaaacaaaaacaaaaaaaactgagagttacagaatagcgtgaacaacttgtataagccctttgtccagattcaccaaccacccacattttgccacatttgacatatatgtgtacatatacgttatacacatatgcatatatgcattttttggctaaatgatttgagagtaagttgtagatatgatgttcctttgccttcaaatactttgctgtgtgtttcctgagaacaagggtatcctctttcataaacatactacagtttttgccccagtctgtattcaaagtttgctagttgcccaaataatatcctttattgggccaggtacagtggctcacacctgtaatcccaacactttgagaggccaaggagggaggattggttgaggccaagagttcaaggccagcctgggcaacatagtaagactcctgactctacaaaactagaaaaaattagcagcatatagtggcgcgtacctgtagtcccagctactcaggaggctgaggtgagagcgttgcttgagcccaggaggtcgaggctgccgtgagctgtgatcatcctgctccactccagtctggataacagagcaagaccctgtggggaaaaaacaaaaaaattagtggccgggcgcggtggttcacacctgtaattccagcactttgggaggctgaggccggctgatcacctgaggtcaggagttcaagaccagcctggccaacatggtgaaaccccttttctactaaaaatacaaaaattaactgggcatggtgacaagtgcctgtaatcccagctactcgggaggctgaggcacgagaatcgcttgaacccaggaggcggagtttgcagtgagccgagatcgcgacactgcactccagactgggcaaaagagcatgattcagtctcaagaaaaaaaagaaaagaaaagaaaaaaaaaattaaatcttttattgcaatgtttctttgctggcccaggatctatctaatgctgcatcatgagttgcatctaatccttttgttttgagacagagtctcgcactgtcacccaggctggagtgcagtggcatgatcttgactcactgtaacctccacctcccaggttcaactgattctcctgcctcagcctcccaagtagctaggattctcctgcctcagcctcccaagtagctaggattctcctgcctcagccccccaagtagctagccaccacacccggctaattctaatccttatatctcttggtctcttttaatctgaattggttcctcagtctttctttgtctttcatgacactgacgtttttggagagctgaggtcagttgtgcagaatggccagcagttgtgcaggaatggctggcctgccatttcctcgtgatcaggttcaggctgtgcatcttcggcagaaaccacagaagcattgctgggtcctcctgggtgcatcgtatcaggaggttcctgacatcagttcccagcattggtgatgttcagctgtcatcaccggggcaaagttggtcaagtttccctgctataagggtgccattttcctccctttccatcctccccctttgtaagggggatgaaagttgaatgactgaccaggggctagcatcgcagaacagttaccctatagggagatacattgagaccgtgtgaatatcctactgcccaataagctttcccccatagattttagcatcttttgattatttctcctgatcattgttttgctttctttttttgttcgtttgtttttgttgttgttgttgttgttttctttctttctttcttttttttttttttgagacagtgtcttgctctgtttcccaggcagggttccagtggcacaatcatagttcactgcagcctcgaactcctgggcccaagtgaccctccttcctcagcctcccgagtagctgggactatagacacgccccacaactcctggccttctctggtgctttttgttttaattgaggtaaaattcacataacgtaaaattaaacattgaccactttaaagtgtgttcatactgtgtgaccatcacctctagttacagatcatttccatccctgcaaacggaaacctccccattctccctcctccaggccctcgaacccactaatccactttctgtctctatgaatttatccattctgggcatttcgtgtcaatggaatcatacactatgtagccttttgtgtctggcttctcatcatgtttttggggttgttctatgttttagcatggatcctggcttccttccttttaattttattttattagttattattattattattattattattattattattattattattatttttcaagacagggtctcactctgttgcacccaggctggagtgcagtggcacgatctcagctgactgcaacctccatctcctgggttcaagtgattctcctgcctcagcctcttgaatagctgtgactacaggtacttgccaccacactcagctaatttttgtatttttagtagttaataatcctagttattttgtaaaaatataaaaatttatgtttttaatagagcctcaccatgttggccaggctggtctcagcctcccaaagtgctgggattacaggcatgagccactgtgcccggccttccttcctttttatggctaagtaatatttcattgaatggctataccacacattacttatccagtggtccattaatactttggatggatgattttttttttttttgagacggagtctcactctgtcacccaggctggagtgcagtggtgtgatctcagctcactgcaacctccgcctcctggattcaatcaattctctgcctcagctctcaagtaactgggattacaggcactcaccaccatgcctgactaatttttgtattttagtagaaacgagggtttcactatcttggccaggctggtctcgaactcctgaccttgtgatccacccgcctcggcctcccaaaatgctgggattacaggcatgaaccactgtgcctggctggatggattttttttttttttttgacggtctcttgctctgttccctaggccggagtgcagtggcgcaatcttggctcactgcaacctctgcctcccaggttcaagagattctcctgccttagcctcctgagtagctggggttacaggtgcaccaccatgcccagataactttgtgtatttttagtagggacagggtttcaccataccgtccaggctggtctcaaactcctgaccttgtgatctgcccgctttagcctcccaaagcgctggattacaggcgtgagccaccacgcctggctggatggatgatttttaaaggctgaaagagaaagaagcaaaggagacagagaaggattgtcaaagagagacagccgggcatggtggctcatgcctgtaatcacactttaggaggcagatgcagaagaattgcttgagctcaggaattccagataagcctgggcaacatagtgaaatcccatctctataaaaaattttaaaattgccgggtgtggtggctcacccctgtaatcccaccatttgggaggccaaggcgggaggatcataagttcaggagatggagaccatcctggctaacatggtgaaaccccgtccctactaaaaaatacgaaaaattagccaggcatggtggcacgtgcctgtagtcccagctactcagaggctgaggcaagagaatcgcttgaacccgggaggcagaagttgcagtgagccgagattgtgccactgcactccagcctgggtgacagagtgagactccgtcacaaaaaaaaaaaaaaaaaaaaattaattatctgggcatgggcacacactggtagtcccagctacttaagagtctgaggggctgggcgcggtggctcacatctgtaatcccagtactttgggaggccgaggcgggcggatcatgaggtcaggagatcgagaccatcctggctaacacggtgaaaccctgtctctatttaaaaaatacaaaaaattagccgggcgtggtgatgggcgcctgtagtcccagctactcgggaggttgaggcaggagaatggtgtgaacctgggagacagagctttcagtgagccgagatcgtgccactgcactccagcctgggcgacacagcgagactccatctcaaaaaaaaaaaaaaaaaaaaaaaagaagaggctgaggcggaaggatcgcttgagcccaggagttccaggctgcagtgagctatgatcacaccactgcactccaacctgggtgacagagctgtctcaaaaagagagagagagagagagtgctaaggatgaaagttgaggcccgggcacagtggctcacgcctgtaatcccaacactttgggaggccgaggcgggcagatcacaaggtcaggagttccagaccagcctgaccaacatggtgaaaccctgtctctactaaaaatacaaaaattagccgggcatggtggcgcatgcctgtaatcccagctactcaggaggctaaggcaggacaaccacttgaactcgggaagtggaggttgcagtgagccaagatcgcgccactgcactccagcctgggtgacaaagcgagactctgtctcaaaaaaaaaaaaagaagaagaagaaagttgaatgactgaccagcggctagcatcactgacaacccctggtcttgccctggcttctcagagggcaggaggtgaagatgttcaatcatttccatcttacaggtacagccatataacttagagaagacaggccaggcgcggtggctcacgcctggaatcccagcactttgggaggctgaggtgggtggatcacctgaggtcaggagtttgagaccagcctggctaacatggtgaagccccgtctctactaaaatacaaaacttagctgggcacggtggcgggtggctgtaatcccagctactcaggaggctgatgcaggagaatcgcttgaacctggaaggcagaggttgcagtgagccgagatcgcaccactgcactccagcctgggcaacaatagtgaaactccatctcaaaaaaaacaaaaaacaaaaaaaacagtgactcactgcagcctttctggaagaaaagttgaggtttgaagctaagtctcaagccaggtgtagcggtgcacgcctatagtcccagccactcgggacactgaggcaggaggatcgcttgagcccaggagttccaggctgcagatgatcatgacactgcattccagccttggagcaagactttctcaaaagaaaaaaaaaaaactggctgggcacagtgtagcacacctgtaatctcagaactttgggaggctgaggcagaaggatcacttgagctcagagtttgagaccagactgggccacatagtgagactctgtctctacaaaaaaagaaaagaaagaattagctgggtgtggtggtgtgcacctgttgtcccagctactcagggggctgaggcaggaggatcacctgagcctagagttcgagaccagcctgggtagcacagtgagaccccatacacctgtagtcccagctatgtgggcgtctgaggcaggaggatcacctgagcctaggagttccagactgcagggagccatggtcgagtcgcaccactgcactgcagcctggccaacagagtgaccttattaaaaaaaaaaaaaaggaagaaaaagaaaaaaaatgaacctgggtctcagtgactcccggccacatggagtacaggggcggggtaggggttgggcagaggaataacagaagttgcctaagaaggggcacacactgactcacggtgactgtgctgagtcaagaggcccatggggacaggcacagatctagtcctgcgtcatgcctaccacccaggaaggaaatccaaggccctcagtcctgcatttgggccccttgggccgggactgaccctctccttcctaaccctccccaccaaacccccagcaaaaacaacaaacaaaaaaccattgtcacaccatgtcaaaccccagatgcaaccagcaggccttgtgctcccatggtctttgcctgggtgcttccctctgcctgagacacccagctgcacagaaacacccttttgcttcctccccaagcaggaactcacagccagtgtgacctcttcaaaaattcattttcttccagctagagggaatgttctgctgtttctcacacagttctcacacaggccacccctttgcccatgccgctctctttatttttttcttttcttttcttttttttttttttttttgagacagagtttcgctcttgtcacccaggctggagtgcagtagtggtgtgacctcggctcactgcagcctccacctcccaggttcaagtgattctccggcctcagcctcccatggaattacaggggcgggccaccacacccggctaatttttgtatttttagtagagatggggtttcaccatgttggccaggctggtctcgaactcctgacctcaagtgatccgcccgcctcagccttccaaagtgctgggattacaggcgtgagccaccacgcctggcctgctctctttctttctttctatttatttatttacttatttttaatagagacagggtctcgttctataggccaggctggagtgcagtggcgtgaacacagctcactgcagccttgacctcccaggcttaagtgatcctcccaccttggcctcccgagtagttggaattacaggtgctcagcaccacaccctgcttatttttgtattttttgtagcgatgagtgtctcgctatgttgcccaggctggtctcaaactccagagcttgagcgatcctcctgctcttggcctcccaaagtgctgggattccaggcctgagccactgtgcctggccccttatttctatttctggttacctcctatccattcttcagggataccactccgggaagtcctccctgtccctcagtctgcgctgctctctccccgacacccccgctctcccggtgccctttttctccatggctcagccttgttcacaaggggttgggggtgtctgtaccctggtttgtcccctatttaaagactaagggctggctgggcacaggggctcatgcctgtcatcccaacactttgagaggacgaggggggtgggtcacctgaggacaggcatttcagaccagcctgggtaacatggtaaaaccctgtgtctacaaaaaacacaaaaattagctgggcatgctggtgcatacctgtagtcccagcaattcagaagactgaggtgggaggattgcttgatcctgggaggtggaggttgcagtgagctgagatcgtgcccctgcactccagcctgggtgacagactgagaccctgtctcaaaacaaaaacaaaaaacaaacaaacaaaggactgagggctccttgggggttagacagaggatgaggcttcttgagggtcccagcatcccccagcatggagtgagcaaaaagcaggtgacgtaggacggtttggtgactcaggaaggggctgaaggagctgggaagcccagcccagaagagccacttcagggccgggcgaggtggctcacgcctgtaatcccagcactttgggaggccaaggtgggcagatcacgaggtcaggagatcgagaccatcctggctaacatggtgaaaccccatctctactaaaaatacaaaaaattagccgggcgtggtggcaggtgcctgtagtcccagctactcgggaggctgaggcaggagaatcacttgaacccagaaggtggaggttgcagtgacccaagatcgcaccactgcactccagcctggtgacagagtgagaccctgtcccccgaaaaaaaagccacttagccacttcaggggcctcaaaccactctgttcagtataattttgcaggcgggggtggtctatggttccacagaagggtctagggattgaggggcaaagttagggccctcaaggaaaggccagctcctcccttggcccatctgagaaggggctttctttcttttttttctttattttatttatttatttatttattttgagacagaatgtcattctgtcacccaggctaggctgcagtggctcgatctcggctcactgaaacctccgcctccggtgttcaagcgattgagaaagggctttctgctggaatggatgctgtaggaggtgctgagctcctcatcactaggagcaaccaaggaccctggacacacatttcactaggcaggaagttcagagtctgtgactgctgatacagcacaccctgatctgtgggagagggggaagtaacggtgaaaacccaggcagaggacttcacgggggaatacagactaaaagaagaaagacccggccaggagcggtggctcatgcctgtaatcccagcacttggggaggctgagacgtgcggatcacttgaggtcaggagttcgagaccagcctggccaatatggtgaaaccccatctctactaaaaatacaaaaattagtcaggcttggtggcagacgcctgtaatcccagctacttgggaggctgaggcaggagaatcacttgaggcaggagaatcatccctgcaacccaggaggcagaggttgcagtgagccgagatcgcaccactgcactccagcctgggcaacagagcaagactctatctcaagaaaaaaagaaaaagaccccgccgggtgcagtggctcaagcctgtaatcccagcactttgggaggccgaggtgggcggatcacaaggtcaggagattgagaccatcctggttaacatggtgaaaccccgactctactaaaaatacaaaagaaattagccgggtgtggtgacgggcgcctgtagtctcagctacttgggaggctgaggcaggagaatggcgtgaacctgggaggtggagcttgcagtgagcagagattgtgccactgcactccagcctgggagacagagcgagactccatctcaaaaaaaaaaaaaaaagaagaagaagaaagacccatctacaaagcacccgctcagccgaagatggggtctcagctgcgggttcctgccactgccctccagccacggtggtgggacccacccaaggtgtccagatccctaggggactgggcagtcggagcaacccttcccatggccttgcagctgcggccgcacagttcccaacatggtgggggtgggcttgagccccctccccggcccctgctggctgccttggctggggactgcatttctcctccatgagctcagtccctggggacgcgggacctggggccaggccaagacacagctgccggcccgctgaccgggaacctgagaatgtgcccttggcttctcctcttgggactacagtcccgccctctgcgcggaagctggggccaggttctcgagccaggcagtgggctgtgggagcctagtgagaaccagcaggagtgagggcaattgagtgtgggccttcggcaagtgtggggaggctggacccagccatgtcccctggacactgcttccctgggacactccgatgcttgaaacttccatggctccccattgcctgaagtgacacaattcctccccacctcatcagcttcatctccctgcctctcagccttgtcagcctttgcatgcagagttcccactggtaggaaaatgcttctcatactacaaaggctcctttcccctggctgctcactctgaacctccagctcttctcaccttcattcagtcattcaacaaacatttactggacacctacttggtgccaggccttattgtagacagaggtgacccaagacagagccagttcctgccctgagaagggaagcagacaagaaacaaataggcaaacaagaaccatcaaggttgagtgcagtggctcacgcctgtaatcccagcactttgggaggccaaggaaggaggatcacttgagtccaggagttcagaaccagcctggtcaacatagcgagaccccacctgtctcttcagaagaaaaaaaaaaatttttttttgagatagagtctcgctctgtcactaggctagagtgcagtggcaccatctccactcactgcaacctccacctcccggatccaagtgattctcctgcctcagcctcctgagtagctgggattacaggcatgcgccaccacgtctggctagttttttttttttttgtatttttagtagagacagggtttcaccatgttggtcacgctggtctcgaactcctgagctcgtgatccacctgcctcggcctcccaaactgctgggattacaggcatgagccaccatgcctggcctaagaaaattttttaaattagccaggcataggtggtgcatgcctgtagacccatctactcccgaggctaaggcaggaggatcacttgagcccagagtttgaggctgcagagagctatgattgtgccattgcacttcagcctgggcaaaagagcaagaccctgtcttaaaaaaataataataaagaggctgggtgtgatggctcatgcctgtaatcccagcactttgggaggctgagttgggtggatcacctgaggtcaggaattcgagaccagtctgggtcaacatggtgaaacctcatctctactaaaaatacaaaaattagccgagcacggtggcaggtgcctgtaatcccagctactcaggaggctgaggcaggagaattgcttgaacccgggaggcggaggttgtcatgagctgagattgcaccactgcactccagcctgggtgacggagggagattccatctcaaaaaaaaaaaaagaaagaaaaaagaaaagaaaccaaaacagagccattgagacaagatggttaaatgtgagggagagagggggaagtcacctaaagaaggagaggagccagcgaggcaaacatccagggctagggtgttccagacagagtgaacagcaagtgcaaaggcccagaggaggaaggagagggtggacgagaggaacagcgaggaagcctgggtgcctggtgctgaatgagcaaaggtgaggaggtcagggaagcaggtggggctgactcccaaggggccagagggtctgggattctagcccaagcacagtgaagccactggagggttttagcacaagaagctgatctgatttagtttgcaaacaatcactttgggtttttttggttttttggagacagagtctcactctgtcgcccaggctgtagtgcagtggtatgatctcacctcactgcaacctctgcctccgggttcaagtgattctcgtgcctcagcctcccgagtagctgggactacaggtgcacaccgccatgcccaggtaatttttttgtttctttgagacagaatttcactcttgtcacccaggctggagtgcaatggcgtgatctcgactcactgcaacctccgcctcccgggttcaagctattctcctgcctcagcctcccaagtagctgggattacaggcatgcaccaccacgcccagctaattttgtatttttagtagagatagggtttctccatgttggtcaggatagtcttgaactcccgacctcaggtgatccacccacctcggcctcataaagtgcttgggattacaggcgtgagccactgcacccgccatttttatttatttatttttattttttcacggagtctcactctgttgcccaagctggagtgcaatggtgccatctcagctaactgcagcttccacctcctgggttcaagcaattctcatgcctcagcctcccaagtagctggaattacaggcaccagccatcatgcccagctaatttttttatttttgtaaagaacgggttttaccatgttggtcgggctggtcttggacttctgacctcaggtgatcggcccacctctgcctctcaaagtgttgggattacaggcgtgagtcaccgcctcagccttttttttgtttgtttttttggagttagagacaggttctctctttgtcacccaggtggagtgcagtggtgcaattgtagctcactgtaacctcaaactcctgggctcaagcgatcctcccctcagcctcctaagaagctaggacctacagacatgcaccaccatgcccggctaatttttttttctttgtctttttttttttttttttttttttttgagacggattctcgctgtcgccaggctggagtgcagtggcatgatctcagctcactgcaacctccgcctctcaggttcaagcgattctcctgcctcagcctccccagtagctgggactacagatgcgtgccaccacgcttagctaatttttgtatttttagtagagacggggtttcaccatattggccaggatggtcttgatctctcgacctcgtgatctgcccgccttggcctcccaaagtgctgggattacaggcgtgagccactgcgcccacccttttttttttttttttttttcctgtagagatacagtcttgaactcttggcctcaagcaatcttcctgcctcagcctcctgaagtgcgggaattacaggcatgagccaccatgcccagcctggaattcacttcgatggagcgtctgcagctctgtggctctgggaaagggtagaagggaggccattctcaaccccttctgggggtgctggtttccccaccccagaagcttccattgggtctgacgccctgttctctgtcctgtcttctcaggccctgggctccggaccacagcaaccttccatgcccatggcctcaccctggatcttatctcctcttgctcacctctgaactgtgatattctgatgtcccctaactcagtggcctccaacctctttggcaccagggactggttttgtgaaagacaatttttccacggaccggggtagggggtggtttcgggatgattcacgtgcattactttttttattttttacttttttgaggcggagtttcgctcttgttgctcaggctggagtgcagtggcgtgatctcggctcaccgcaacctccgactcccgggttcaagcgattatcctgcctcagcctgccgagtagctgggattacaggcatgtgccaccatgcctggctaattttgtatttttagtagagatgaggtttctccatgttggtcgggctggtctcaaactcctgacctcaggttatcctcccacctcggcctcccaaagtgctgagattacaggtgtgagccaccgtgcctggacactggacactttctttttttctttctttctttttttttttgagatggagtctcactttgttgcccaggctgaagggtagtggcacaatctcggctgactgcaacatctgcctcccgagttcaagcatttctcctgcctcagcctcccgagtagctgggattatatatgtgcaccaccacacccagctaatttttgtatttttagtagagacagagtttcaccatgttggccaggctggtcttgagcccctgacctcaggtgattcgcccgccttggcctcccaaagtgctgggattagaggcgtaagccaccgtgctcggcctacattttaatttttatttatgtatttgagacagagtctcgctctgtcacccaggctggaatgcagtggtgtgatctcggctcactgcaacctctgcctcttgggttcaagtgattcttgtgcctcagcctcctgattagctgggattacaggtgtgcgccactacacccacctagtttttgtattttcagtagacagggtttcatcatgttggccaggctggtctctaacacatggtctcaagtgatccatccacctcagcctcccaaagttgtgggattacaggcatgagccaccgcgaccagcctcaaacgcataagatttattgtgcactttatttctattattattacattgtactatatgatgaaataatgatacaaccgtaatgtagcaacagtgggagccctgagcttgttttcctgcaactagacggtcccatctgagggttatgtgagacagtgacagatcatcaggcattagatactcataaagagcatgcagtctagatccctcacatgcgcggttcacagtagggtttgcactcctatgagactctaatgctgctgcttatctgacaggaggcagagctcaggtggtaatttgcggagggggaggggctgtaaatacagatggagcctcgctggctctcccgccactcagcttctgctgtatggccctgtttctctgtggcctgaggtttgaggacccctgcccttactgctccctgaccccagaagtttgtcctccttcctgtaggggtgacacttgtccccactgtcccaactaccttccctcctacttgagagaaggggacctcctcccctaggctttcattacctccttccttagccataggctgaaatctcttccatgatgaagtaaaaatctggccaggtgcagtggcccacacctgtaatcccagcactttgggaggccgaggagggcagatcacttgaggtcaggagtttgagaccaacctggccaacatggtgaaaccctatctgtactaaaaataaaaaaattggccaggcatggtggttcatgtctctaacgtcagcaatttgcaaggcgggcagatcgcctgagttcaggagttcgagagcagcctggccaacatggtgaaaccccctctcaactaaaaatacaaaaattagccaggtgtggtggcgggcacctgtaatcccagctactagggaggctgaggcaggagaaccgcttgaactcgggaggcggaggttgcagtgagccaagattgtgccactgcactccagcctgggtgacagagcaagactccgtctcaataaacaacaaacaaacaaacaaaaattagctggaggtgatagtgtgagcctgtagtcccagctacgcaggaggctgaagcaggagaaccacttgaacccaggaaggcagaggttatagtgagcttagatctcaccactgcactccagcccgggtgacagagtgagactccatcttacaaaaaattaaataggcagggcctggtggctcacatctgtaatcccagcactttgggaggccaaggtgggcagattgtctggtggctcacatctgtaatcctagcactttgggaggccaaggtgggcagattgctgagctcaggagttcaagaccagcctgggcaacgtggtgaaaccctgtctctactgaaatacaaaaaattagccgggcgtggcagcgtgagcctgtaatcccagctactcaggaggctgaggcagtagaatcacttgaacctgggagttggaggttgcagtgagccgagattgtgccgctgcactccagcctggaagacagagcgagactccatctcaaaaaaataaaaaaatacaagaaataaataaatactaaagtaaaatccacagcaaatgctcatcccacatctgcccggccccagctctggtcgcctctccctgctttgcacctccccagacccctggctccacctctcccttctccactccactctgtgcattctacagatgttcttgtcctccagtttccggtgggtttggacaactggaggcactagcagaagatgtagggcgggcttggtggctcatgcttgtaatcccagcactttgggaggccgaggtgggcggatcacttgaggtcaggagttcgagaccagcctggccaacatggtgaaaccccgtctctactaaaaatacaaaaattagccgggcgtggtggtgggtgcctgtaattccagctacttgggaggctaaggcaggagaatcacttgaacctgggaggcagaggttgcagtgagctgaaatcacgtcactgcactccagcctgggcaacaagagcgacaccccatctcaaaaaaaaaaaaaagaagaaaaagaaaaagaaaaaaaaagatgtcagaggaaagtgaattggggacactaatcctcccggatccctccctgcggggtcgcctcaacttggctgtgtccatcatccacacgactctctccctaggctctgctaacatccttccccttgccccatcgggagcatccagaaatgataaaggatctccaagggtgcttgccctggctgcctcagcaactcctgttggtttccccaaactctgcccacaccactgtgtatagtccttgcagcaaacctgcctcaaatttcccggtttgtaattttttttttttttaatttttagagactgggtctcactgtgttgcccaggctggtgtcgaactcctaaactcaaacgattatctctcctcagcctcccaaagctctgggattacaggagtgagcccgggtgcctgaccgcattactctgtttgaatgtgttcagttgtttttccccaagcctccaatatttccttgcccctccctgcttaacctcattcagagcagccaagccctctgccttcagtctcactcctggctttcctccctcataacttggagatttgtatagctctcacttgattatctcagaggttgtttttgttttattttgttttgttttgttttagggttttttgttttttgtttgagacaaggtctcgctctgtctcccaggctggagtgcagtggcacgatctcagctcacggcaacctccacctcccaggttcaagcaattctcaagcctcagtttcctgagtagctgggactacagggacccgctaccacgcccagctaagtgtttttttttttttaagtagagacggagtttcaccatgttggccaggctggtcttgaactctggcctcaagtgatctgctcaccttggcctcccaaagtgctgggattacacgagtgagccactacgcccggcctgggtttttgtttgtttgtttttaagacacggtcttgctctgtctccaggctggagtgcagtggcatgatcacagctcattgtagtcttgacctcacaagctcaagcgatcctcccatctcagcctcctgaggagctaggactacaggcacacgcctccatgcccagcagttaaatttttttttttttttttaagagacaaggggtcttgcaatgtttccaaggctggtctcaaaactcttggtctgccgtgatcctccttcctcggcctcccaaagtgctgggattgaaggcatgaaccaccacgcttgtctctcagcagcttgtgacgccaggaactacatccctattccttgacgctcctccctcctccattgctggggcatcacttttgcctggttcacctcctacctttttttttttttttttttttgagatggagtctagctctgtcatccaggctgtagtgcagtggtgtgatcttggctcactataacctccacctcccgggttcaagcgattctcctgcctcagcctcccgagtagctgggattacaggcgcccaccaccacgcctggctaatatttgtatttttagtagagacggggtttcgctgtgctggacaggcttgtctcaaactcctgacttcgtgttcctcccgcctcggcctcccaaagtgctgggattacaggtgtgagccactgtgcctagactttttttttgagatggagtctccctctctcgcccaggctggagtgcagtggcatgatcttggctcactgcaacctctgcctcccgggttcaagtgattctcctgcctcagcctcccgagtagctgggactacaggcatgtgccaccatgcccggctaattttttgtaattttggtagaggtggggtttcaccatgttagccaggacggtctcgatctcctgaccttgtgatctgcccgcctcggcctcccaaagtgctgggattacaggcgtgagccaccgtgcctggcctcacctcctacctttgtggcctctctcctctgcctgtctctgaggtgttgggggtcctcagggttcagtctccagtcttgttctccattctgctctagggagacttcaccctcgctcccagcttaagagcctctctgccccacaatacaccgatgcttgctgggctatttttgtctttagcccataacatgcttctaagtccctaccccgggatccagcgccgtcagactgaatatatcccaaacctgcctctgtaccttctcagcgtatctgctcctcttccagtgcctggacttgagtctcgttctccactgcctggaccacgcccatcctcctctgaggccttcccgtcctctggtccggccttctcaccatcccccaagtaacattccagacacacggatctgtccgagaccctcccctgctggcatgtgaagccttttatagtctcacgtcttcctagcccaaactttcctcccagtctcacggaaatgctaaatcatcccggcgtgggaggcttctgtgggtcggggcgcagctttgcaaggttcagctccaagactgcttcctccagggagccttccctcccttcccccaggtaagtgctcctccccagttgctcattccaccagggcctgatcacaccctgctggcagtgtcagagcccggctttgtcttccaccacccctcctagaactggtggcagggacagatgaatggatgaatgaatgaatgggaagtgagaattctactactggaccatcaatgcagccctcggaatgagtgagtgagtgagtgagtgagtgagtgagtgatggaaagtggtctggaggcagggagagggacaggccgatcatgcgaggaatcccagcccaagcccccgaggtccccgctcccgccctaaaagatgcacgcgccaagcccttgggccagaaaaaaaaaaaaaaaacgggccgggattggctcaggctgggggaggcgggtctacgacgagacacgattttctattggcttactcgccaggactctgcccaatcgacgcgatcgtcttccccagaagacccccgcctccctcccgccggcggccgcggaggcggaagaaggcgcctttccgtcgccctagcaaccgtcagcggatctccgtcgcccgggcaactgtcccaggcctcccgtcagcctttgcctgggcccctccggtcactcggacaaccgctacccgttccggtcaaccatcaacccgtcccccgtcaccccggcaaccatcgccggacccacctacccctggacgccgtcctggtcctgtccgcaggcctcctcgccccaaacctccgccgcgggctccgacgtccgcgaccccacgtctcaggggctccctcctcctcctgcccgtcttctcgcctccccggggcggggggcattgctcctcccctggcaggggggccccgggttggacccggctctgggggtccctgctcggtcgggacagtgggaccgccctgtgctgtggccgcgcgcagccccccgcaggcttcggcgctcgcactcttgcgtgggactgtccaaccgccacagggagctcttcaaaatgcaagccatgtcccttccctgctgaaaaccctcccctggctccccttgagaatcgaatccaagctcctcgcagcccctggcgatctggctgtgtggcctcttctctgaagcctcctcgctcactctgccttagcaaggccctggcctgcgtgttgtaactccaatgacccaagcttcttcccgcctgggaccttcctagtcactacttcccactccaccaaaaagtgcatcctagacgggcgcggtggctcatgcctggaatcccagcactttgggaggccgaggtgggaggatcacttgagccgaggagtttgagaccactctgggcagcatagtgagacgtctgtctctataaaaaatttttgggaggccgaggcaggcggactgcttgaggtcaggcgttggagatcagcctggccaacatggtgaaaccccgtctctgctaaaattacaaaaattagccaggtgtggtggcgtgtgtctgtaatcctagctactggggaggctgaggcaggagaatcacttgaacccaggaggtggaagttgcagtgagctgagatggcgccactgcactcccgcctgggcaatagagcaagcctccattctcaaaaaaaaaattaaaaattagcctggcatggtggtgtgcccctatagtcccagctactcaggaagctgaagcaggaggattgattgagcccaggaggtagaggctgctgtgagcttacgtcacaccactgcactccagcctgggcaacagagtgagaccctgtctcaaaacaacaacaaataagtgcatcctctagctagggtcccacctgtgagtcttcagtgaagccttccctgagccctgtcagctctctcctccttaaactctttctggctcacactctgtcactaggacctagaacactgcctggtatctatgttgagtaaaaagatgttgtgccaggcgcagtggctcacgcctgtagtcccagcactttgggaggccgaggtgggcggataatgaggtcaggaattcgagaccagcctggccaacatggtgaaaccccatctctactaaaaatacaaaaatgggccaggtgcggtggctcacgcctgtagtcccagcactttgggaggccgagacgggtgaatcatgaggtcaggagatcgagaccatcctggctaacacggtgaaaccctgtctctactaaaaatacaaaaaattagccgggcgtggtggtgggcgcctgtagtcccagctactcgggaggctgaggcaggaaaatggtgtgaacccgggaggcggagcttgcagtgagccgagatcgcaccactgcactccatcctgggacagagcgagactccgtctcaaaaaaaaaaaaaaaaaaaaaaaatacaaaaatgagctgggtgtggtggcggacacctgtaatcccagctgttcaggaggcagagacaggagaatcgcttgagcctgggagggggctgcagtgagccgagatcgcgcaattgcactccagcctgggcgacagagcaagactccatctcacaaacaaacaaacaaaaaaaggatattgtgctggggataagggaggacagagggggatgaccagcaggcaggcctatctcagagacaggagaatgtatttctcagggcctctcagtcctcatggtacaggtgatgatggcaacatccccaaaaagccaggcacaagccagggagatacaagctgatgctacggtcagcctgagactgggtggcgcaccctccacatataaccgccaccccccacccatccccaccccagagggctccagagtcagcggaaactgtggctaatttggagcagaagtttccaggagctggagaggcaggcctcagatcccagatggcttttctgggagctggtcccttcctgcccggaatccagaatctcacttgtcctaacagagacgagagctgttttcccagggatctgagacaggccagcccaggctggggcaagagaacttgacctgaccaggcctggggtcatgacggggggtgagggaaggggcttgtgggagctctcctgggactggctggagaggaatgaggaatctgcacacccacctgcctgctcatgagggtctgcccttggggaggttgccaggggccaggcagggaggccccctgctctttttttttttttttgagatggagtctcgctctgttgccaggctagagtgcagtggcgcgatctcagctcaccgcaagctccacttcccgggttcatgccattctcctgcctcagcctcctgagtagctaggactacaggcgcccaccaccacgcccggctaattttttgtatttttagtagagacagcatttcaccaggttagccaggatggtctcgatctcctgacctcgtgatccgcccacctcagcctcccaaagtgctgggattacaggtttgagccactgtggtcggccctgacccctactcttaagctaggattaccctcatcagcgctgccacacacaactttcttcactgatgcggcaattgagcacttgaaatacagctggtatggccaggcacagtggctcacgcctgtaatcccagcactgtgggaggccaaggtgggcagatcacttgaggtcagcagttcgagaccagcccggccaacatggtgaaaccccatctctactgaaaatactaaaattagtcaggcctggtgacgctcctgtagtcccagctactcgggaagctgaggcacaagaatcgcttgaacccggcaggtggaggttgcagtgagcctagattgcgtccactgcactccatccagcctgggcgacacagcaagactctgtctcaaggggaaaaaaatgaaatacagctggtgggactgagcactgcattttcattgtatttcatttcaattaacatacatttaagctgaagtagccaaatgtggtcagcagtattgtattcagagtagcactgagctgaagacccaggcaggaggtcgaaggcagggacaggaaggtcagggtttaaggtctgtgcagctatggcagagaagcgactttggcaaagcgcagagtgaggccccaggaagggaggaggtgggacactcggtctcggcatctggctccactggaagagaggtatacccagttcccagggtcaaagtgtttgttacacacacatgcatccatgcctgtgtgtgagtataggggttggtgtgtcccgaggcacccataggtgcgcttgtgtgggatccaggagtcccatgcctatgagcgattcaagagttcacccatgtatggacattgtatggactcccaggcacacacagataatgggtgtgtgttccttcctgagtatccatgcctcctgggcaggccagcaaggaccactagtccagcaggtcttgcaagaaggcccacatgtactggtgcatctcctgggggttgctctgtgggatccaatgccctatgcctggcaggatgtgggcctccaagcggcccggcacaaagcggctgccgatggcttccaccagccccagctccaagtaagtgtccttctccccccacagcagcaatgtgggtgtggtcagctcctggggttccagggggaagttcctgtggccaggacagacagacaggcagacagacaggcagaaggatggttgcctcccacccccctgcccctgcaaatctcctgagcttatgcttggcaactggtctcacctgaagaggtttcggtagtagttgaggggcccagtgaggccaccaggctgtgagaagttataaaggaaggcctcgagctcgctgggggtcaagcatgggatgcctgtcttgcggtgggtgagggtggtcttcagaatctaggtacacagcaggactctggcttcagtgcccagcctgcccagccccgacctgcttccctcctcccttcaacctgcaccctctgtacctgaaagtcagacatagacagcagcttctcgggcagccagggcagctggaacaggaacatgtagtgggaacggaagaactggctgatgtggtgcagggaatagtctggggtgggagggttgggggagagatataaggcctgctcctggggtggccccatacacctgcacccctacacatacccaggtcagggacacaagcctcaggaatgccactgctgcctgcctgggtctgtgaaggtactagatacccctcctggcctgggcaccagctacattccctcctgccatgtttcactatccacaggatgggggcatctcctgggaacccccatatccaaaggtgtgcttcctctgcccaggccagggtgcgtttcctctgctttattcagctaacatttattgagcaactactgcatgccaggccttgttctagacacagcagtgaatgagacagtcaaaactccctgttcatcctaggcaacttaaggaaacccctgtatctataatttttttttttttttttttttttttttttttttgagacagagtctcgctctgtcgcccaggctggagtgcagtggtgtgatcttggctcactgcgagctccgcctcccgggttcacgccattctcctgcctcagcctcccggtagctgggactacaggcacccgccaccacgtccggctaattttttttgtatttttagtagagacagggtttcacagtgttagccaggatggtctcgatctccggacctcatgatccacccgcctcagcctcccaaagttctgggattacagacgtgaaccaccgcacccggcctccaaaaaataattttttaaaaattagcagggtgtggtggtgtgtgcctatagtcccagctacttgagaagcagaagtgggaggatcgcttgagcccaggagtctgaggctgcagtgagctgcaattacagcactgcactccagcctggaccacagaacaagactgtctcaaaggaaaaaaaacaaaacacaaaaaaagacacccccaaaagacaaaaaactccctgccctcagggagctgacagtctagatggggagacagacaagtaaacaataataggctgggtgcggtggctcacgcctgtaatcccagcactttgggaagccaaggcgggtggatcacttgagatcaggagttagacactaacctgggcaacatagtgaaaacccgtctccactaaaaatacaaaaattagctgggcgtgttggggcatatctgcagtccccgctactctggaggctgaggaaggagagtcacttgaacccaggaggtagaggttgccaggcagggtggctcactcctgtaatcccagcactttgggaggctgaggccggcagatcgcttgagcccaggagttcaagaccagcctggccaacatgctgaaaccccatttctactaaaaatacaaaataattagccggtcatggtggcacacatctgtagtctcagctactgaggaggctgaggcaagagaatcacttgaacctgagaggcggaggttgccgtgagccgacattgcgccactgcactgcacagagtgagactccatctcaagaaaaaaaaaaaaaaaaggggccaggcgtggtggctcacgcctatactcccagcactttgagaggccaaggtgggcagatcacaaggtcaggagatcaagaccatcttggccaacatggtgaaaccccgtctctactaaaatacaaaaaattagcccggcatggtggcctgtaatcccagctacttgggaggctgaggcaggggaatcgcttgaacctgggaggcggaggttgcagtgaactgagatcacgccactgcactccagcctggcgacagagcaagactctgtctcaaaaaaaaaaaaaaaaaaaaaaaaaagaaaagaaaagaaaaagaaaaaaaacaacaaaagagagagagagagcacagttatgaccacagtgctgcatattaacatcaggtgatatgatagacattgttaacctccccagcctcagtttcctccagctggaacatggggataatacaaccttcataagcccaggagccttaagtaggttactgtgtgcatattccttgttactgtaagtgctataaaaaaatgtggattactcctaagtgtattgtgatttattttattttattttatttttgagacagagtctcactctgtcatccaggctggagtgcagtggtgcgatcttggcttactgcaacctccacttctcaggttcaagtgattctcttgcctcagcctcccgagtagctgagactacaagcgtgcactaccatgcctggctgatttttttgtatttttagtagagacggggtttcaccatgttggccaggctggtcttgaacccctgggctcaagcaatccaccggctttggcctcccaaagtgcagggattacaggcaggagccaccacgcctggccatactttattttatttatttattttttgagatggagttttgctcttgttgcctaggctggagtgcaatggcatgatctcagctcactgcaacctccacctcccaggttcaagagattctcctgcatcagcctcccgagtagctgggattacaggcatgcaccaccaatgcctggctaattacattttttttttttttttgtagagacagttggggtcttgctatgttgaccagactggtcttgaactcctggcctcaagtgatcctcccacctcagcctcccggagggctgggattacaggtgtgagccactgggtctggcgtgtcattaatttccgaatgaggagttccacaaccgaagggacctgggttgattgctgcaccctcagcccctgatgtgttgacaggtatacagagaattgaaaacacagacacatgtccctgcccccttgcacataagtacatcccagtgtcccggactcccacacacaccttggtacaccgacatgggggcaccactgaccacaaccatccgctcgaccagggatgggtagtagatggagaaatgccaggcaaggagggcaccccagtcatgggccacaaggatgcacttcgagtaacctgtgggaattcaaggagctcgcataagtgaggtgcccagtaggactgaagcagggatgggggaagtaggttccagcaaggagaaagcgggggtatgcgtgtgtgcaggatgagggaggccacgcctaggatgggggtatgtctgcacccaggcctaggatgacatctttgatgtccaccagcagcaggtcgattgtgtagcagtccacatcccgaggtgcatccgaggggccatagcctcgcaagtccacagccacaacatggaagcggctctggaactcccggagctggtaacgccaggagaacctgccaggcgggcgagggagggaggctgagtcagggccctcaggttgcacctgcaccctacgcacatcagcaaccattggcaaaccctccttcctgctctaaacttcccctaaaaggaggatggggaatcccaggcagaggcagaggctgaggctgaagccagctacaccctgaatccagggaacttcaatcaacctcaatacccctttgtcctgtcccttcagggcctagggatcctgggtatgctggctcagtacccctatccccatctatgttcagcttgtcccgatctatacagccctcctccctgcctcttgggagcccaagctccacctgcccccgagtcccgtgggcctcaggcccctggccccagacgtaccagttctcagggaagccgtgcagaaacagcatgaggggtccgttacctcgtccagccgagacatagtgcagacgcaggcccgagctctagggggagggcacagcctgaagcctggggaaccctctctcccgaggcttgaaccgtctcgaccccacgcgaccccgcagccccgatagcgcccccgtgcgatcaccttgaggttcaggaaaccgtgctcacccagcgaggggtcgctcaggcaggcgggggacgcgctccgacggcgcccgcagcagccgcgccggggccggcacagcacgtgcgtgagcgctatgcagccgtagaccgccgcggccaccagcgccaccgagaacaccaggctccacatgaaggcgcgcagcagcttcagcgacaggcgcgacggcgccagcagcgcggtcaccaccagctccggcatgtcgccgcgctccgggaccacggcggcgctgccggccaggggcacctgcagcagcggcgaagcggtgtcagggctcaggggcccatcgcccttggcctggggcccctccgtgccgtcgggatttgtgggacgcgctgaaggaagaggcgggcggctccgacagaaaacagccagagcgcaccactcacctgagtgccaggtaaacacctgggcgcgacagggacaggaaacaagggtagggtgcggaggctggggaggaagaggttggaaaggggggaaataaatgggcggggcctagcaggtcctgtgcggggcttagggccggggcggggcccaggaagactcagcagcgggtgggtgagggtctaaaggcggcaattccgggccgggtgcggtggctcacgcctgtaatcccagcactttggtaggccgaggcgggcggatcacctgagatcaagagctcgagaccagcctgggcaacgtggtgaaaccccgtctctactaaaaatacaaaaattagctgggcgtggtggcgggcgcctgtagtcccagctacttgggaggctgaggcaggagaatcgcttgaacccgggacgtggaggttgcagtgagctgagatcgcgccactgtactccagcctgggtcacaacagggaaactccgtctcaaaaaagaaaaaaaaaaaaggcaattccgagcccagacaaaccttaaggaggggatcctggatcttcagttaagtgggcgacacctggagtgaggggcggggcatatgcagagtaggtgcggcctacaagccaaaaaggagaaagagttggaatggtgggcctggcttatgcgggtgggcggggagagggtggatcctagaggaggtgaggcctaacattgggcgaagaaggcgggagcctgggccaatgagctgacggtaggccggggagggggcggtggggtggggtgggcaatgggcaatgagacggagggcggggccgggacctaatatggcgggtcaggagggtctggaagacgaagaagagggacaggcaatgccaggtctaggactaggagggaggcgcgggcggtattagcggctggaggaggcttcgggaggcccggccgacggccgccgcctggtgctacccacccaggggcgcgcgaccctcccttcggtctggctccaaagacctagcagcactgacttcacccagctgtggttccaacggcgggtccagcggcctcggcccggcgccgtcctcctgctggcccaacaggcccgccagcccgcccctgtacgtctgtgattggacggcggcggccactgatgttcaagcgacaggtcctggcccgggagccaatctgcaggtgttgaggcccaggctccgagagcgggccgaggaggcgtggataccctgattcctagggggcaggcctggttcccccgaggaggacccggcctatgaatgactggagttctggggttctggccgaaagaggaagtgggacagggccgggtgtgatggggcctagagtcacagagccttgcggccctgctgtccctgcaagaagccagcttctggccaggcgcggtggctcacgcctgtaatcccagcactttgggaggccgaggcgggcggatcacgaggtcaggagatcgagaccatcctaacatggtgaaaccctgtctctactaaaaatacaaaaaattagccaggcgtggtggcgggcgcctgtagtcccagctactagggaggctgaggcaggagaacggcgtgaacccaggaggcggaggttgcagtgagctgagattgcgccactgcactccagccagggcgacagagcgagactccgtctcaaaaaaaaaaaaaaaagcagccagcttcttcctcctattttgcaaccttctcccgatatccttgaacattttagggacagccatcacttaaccatagagcaaccctattaagtctaagtagcataatcacattcctgtagtatagatcatgaacctgaaattcgaggatgaagtcatttgcctgaagacatacatcttgtaaaatagccatccgcaaagatgtagggaaaaaggcagcgatctgtggctacacctccccttcctcccggaagcagccactggaacgtttttagctttttctttttttttcagatggagtttcgatcatagctcactgcagcctcgaactcctgggctcaagcactacaacctgtagttgggactacaggcctgtgccaccacactcagctaatttttcaaaaacttttcagagagacgacttgctatattgtccaggctggtctcaaactcctggcctcaagcaatcctcaagcctccacctcccaaagtgggattacagatgcaagccaccgtgcctgacctttatttcttgacttaaccaatgtatgacatcagccactgacttgctcacatcactaccccggacgtgccgttttttgtttccctgttagtttcctttaaaaacactccacttgtcacctcttgcccctttccacctcccacttttatccatatacctttgtactgtcaaggctgctaaacattatactgtcctgggaccataactaagtccatgaagttgccacttaaaggtgaatagtggtttatgttctgcctcagtgaacaatgcatctcaagagccgaatagaccactatgattacattgcccatagtgtacaaacttttgttctccctggactacttaaccactacctttcttttgttgtgtgattagcctacatcaaagctttgggggtttttttgtttttgttttttttgagatgggagtctcaccatatcacccaagctggaatgcagtggtgtgatctcggctcaccgcaacctccgcctccagtgttcaagcaattctcctgcctcagcctccggagtagccgggactacaggtgtgtgctaccgcgccccgctaattttttgtatttttcagtagagatgggagtttcaccatgttggccaggctagtctcttaactcctgacctcaagcgatcctcccaccccggcctcccaaaagtgctgggattacagatgtgagccaccgtgcctggcagctttttcttttacaccttccattaaatcaattatctcacaatttgatgttcccaggatctctcccaaccgactccgctaatctggacgcatgggtggtgggtgtctggggaacctcccttcttcctctcctacacatcactgaccccccgccctcatctccccgcttctcccaagtctaccctcaaacaaaaagcagccatcacaggagagtaactttatactcagtacaaatgtttatttttgcaatgagaactgcacaaaaaaaaaaaaaaacctttcgtatgtaagtgaaaagtctacgaattcccttctacaaatgtctaaagtgtttaatacaagtctcagattcactgacataattattggccaagcgatccgtgcatacagtacagtgggggcttgtacacacctcttactctggtataggactaagatttctagtactgtgggaagggttgggaaatggctggagaaattaaatagatcccagttctaattacaacccaggtagagagacacccatcagggaggtgtggagaaggccatggctgagttaaatcttcagcaggaagctgcagagaaaactatccagctcagcagttggacccaggctggggaagtgtctgaacaaaacaaggaacaaaaatgagtgggtgggatgagatggaagaaaccccaaagaacctaaatacgtcacacttgaagtggcacagtggtatatgagaaagtgcctgagtgggcatggacatcgaagaagtggggggacctctggctggatgcctgaaccacaccctcacagggaggtttggcagatccaaagacaataaaggacctttcaggtcaaaaagaggggatgtaggagaataaacagtgctagaaatgtttcaatcagtttgtctctgcatacatataaattatatacttgtatcttacatcttaggggctcttcttgggcgtcacccgtgccttgtggctggggcatgtacatacacaagtggacacacaggcagagcagccacctgtgggctttcttggacaggaatgtgtgtgtatgtgcatggggggtgaggatcctattttgggggatgtagacttatatctaagagtatctggttaaccctgagcttaaatgaaaggaggagttaggttgaggcaggcaaggtgggagaagtggcccaagtcctttggtgagtggggggacaggatggagtaggggggacaggatggagtagggtggaggggaagaatactgtctggagtctggccagggttctgctagagcacaccctccacctcagccagggtccacaaggatgggtaccgggctctgcgtcacagcttcagcttggggtggttgctatgagtctgcgtggctcccgcccagggcagacagggacaggtcacaggagaggggctaggtaatccctggcagtagttcctgtacagaggtggtctggggtccagggggtcccctgggcctagcctaggcaacagttggttcacaaagaaatgtcagggagacgccagcattaaaaaaagagagatgtgtttattccatgatcagtacagaccaaatgcatattcaccgtatgaaagtcaaaccagtcagtgactccagagtttggccaacactgaggcaccagcgtcgtggtgtagagtgggttctcatggcacgcgtaacctcaccaggggctccaattataaaaattaaaaaaaaaaaaaaaaaaaagcatgggcaggagcggccagctggttggggctgggcgccaggtaggggagtctctgccttagtctgtggcgcccccagggcccggttcccacctcatcccttggcccttcctttctcagtaaaaaacaaaaacaaaaacaaaaaccaaaaccaaaaaaaccaactcaacagatctgacattaaaaaacaaaaaagccaacaaatgggtggggggggggggggtggaggggaaagaaaagaaattgtagctttctggttttataattaaaaatagactaataaagtttgaaactgagtaaaatataggcaggattttttttgtgtgttttgtctttttgtggatttttttgagcttttttcttttttcacaccagtttggtggagtcaccaacaaacttcaaacaaagatatgccaactatgttcactatacagtacagccacggtcacacactacccacagcgcggtggcagccgctgctcaatgaggagacgatcacaccatttcggagataagcagtgccattgtgtctggaggagaagagagaattaaaaataaaatagaattcaacaaaaaatatatatagaaaaaaaagaaaaaaaaaaacgaaacagaaacacaggtgggaaggaactgactttggttggtggcctcactccccggccgagggctacccacgcaggacagtcgcctcgctccggatgccatggacacacacacctccacggcactattcccttttgcacaagcaaacacttacagagagcggctctcaattaaaggcttgtgggggagggtcggggggtctgttcaaggcaaagtcagtgccagcgagggggtgggccggcctcgcccgcctccagcccacgcaggcctgccctggcctcctgggagcgggcggcgatggctggggtgtggggaaagactcccggcgggcaggacatcacgaacgtcacgttcttggggacagaaaaccagtcacggcggcagcaacgatgtcctgtgtatactgtgtagacatttggcggagagaagggcctctgccccgcatgtggggatgcagggcttgggtccagccggcacttgctcgtaacaaggcgtgtgctgagcggacgtcctgtgaggggtggtgggtggcgggacgtctgtccgactggccgtaaggcagacaggctctgcaatcctcagctgcccgtcaggcctgccccgggcatagcatgcaggagggccaggccctgaggcatcccctggccgctgatcccacctccaccaccgcccctaacactatggaaagtcaatgttttgccagaaaatcaaagtcagaagccacctaggtgcgctcagaaaagattttcttcaaatattgacaatagatcactctggaaattcatgtcaatggtagctgccatctggaggagaaaggaaggagggagtcaggaggatgacctagccaccctgcagctacaagccctcatacccgctaccagcagtcagccccgtagccctccccgtggctgacccctcatagcgctcaccccgtccacacagcactcagggccctacagctgagtccagaggaccacatgccgaccagcagggacggggctcccccgctgcccctccctgtccaggctccagtccccctttcccagctccctcaggagctaatccttagaccagggtccccaccaggcctccagactcacggcttcccggcgtcttcgctcctgctcccgcttccgggccaactccctctgctggtccagcatggactggggctgggagctctgggcctgtggggtggcggcggcagccaccgcagctgcttgctgttgctgctgctgctgttgctcctggcgctgctgctgctgctgctcctggcgccgacgtgcctcctcatgggcccgccgggcctgctccagcgcatcctcgtcctctcggctcctgggcagagggtcccagtcagcctggggactggtgtggccccaagagtccccatgccccacccagacacccgcccacctcatgcgctcctgccgcagccgctccttctccttctcagcgtgctcggcctgagccttcagggccttctcacgctcctctttctcccgagcggcgcggcggaactgctcgaagctgtcgctggatgacttggctgtggaggagggggtggtcggatgcttctgcactaggctggcccaggagcccatgttcttgattttcaggtcctgcagaacagagaggttggggtgggtgaggggtctgctgtgcctaaagggcatagctgggggtgtgcccagcatggcaccttccagggccaaggggcaagcgacacccatggacctccatcccaacctttttgggcgcaactggagtcttcggctcctgtttctgtttgtccttgtcaggggcccctggtggcggtgcgttctgctctgggggccggatcacaggcctcccgacatccacaggcttcatttccggccctggaacataaacagccggtgggccctggcccacctcaccccagtggggcatggtccaccagccccacagcaagcttatgtccaacacgggcctcggggggcctgagccctggctgtgggcagggagagcactcacgctggggcaggtggacgggggccttgatgctctccgggtgcttggggggctccggccgcagcgaggggctgaagggctcgctgcggatgatgggtgagtggatcttctcctccttcaccaccacgaggggctggggctggaccacggaggcagcacgcagctcctgggatggcacaggcacagcggccggtgaggtgggcaggcacccccggccctagcccacaggactatggcccagccctgccagttacctgtttcttaggctggacgttttgctggggtggagactggtgggtcaggctctggaactgtgacatctggggggaatgtatcataagcggggagggggcttcgcggaggtgacctaggagaagggacaaggaatgtgtcaaggggctggcttagaactgctggccctgagagaattgtcgggaaggaaaacgtgggctgtatggagaaactgcatgtgccgcccaggccctgggacaagggtccattagcccagctcaaaaagggtgaagacccacacaagtgactgggcctggtgaggacatgacccctccccgaaagggctgagtgccctgtgtccccctgcatgtggggcataactcagtgtgcagcagagctttctagggccctgtggcaccagtcctggtgtttgaccctcctgtgtgcatcagaatcatctgggatactgtggaaaacacagatcctgacacatgtgggcttggcagggcctgggccctaatactttttaaacccacaaagctcagcctgggttcctgccaactagcctggcccacctggatgattgcagggggtgcaagacccagtcctgggggtggggatgctcaggaccctccccacagtcctattccccactcagcctgcacgcccccacggaagagagaagcctggaattggcctccacctgcgccgagtggggagcaggcggaaaagggcctggagctgtctcttaggaaacaggccagcctgacacctgcatccaacccaaggctgggaaggatccagcagccacagggactactgggccctcaatcacagtgagccagcacctcgggactgtgcagctggagcagctgagtcctacccatccaacatgtggcctctctctgctggaatccctgcaggcaaggggcctcaccgctctttggctagctgcagctcgggacaagccacactgtccacagaggaggctgcccctctgcaacgcttttgctcccagcctagcctcatgcccatctccttccactgtctgtcagcacaggcacccttgggttctccaggagccctgctggctggaggcatctattttcataggcctggagcaaaccacaatgccccaggtgtggtagatcctctctagagccaggacccactcctaacgccagaagacactgcagctgcttggagcccacatggtggccaggcccatcctgtccccgcagcccactgctgtgtgtggctggttttcctggcgttgacatctcctccaattctagcacatcgggaccactttgggcactgccaattccattcagtgctggagggccccaggtctggcctgccagggatccacaggcacatgactgcaacagcctcccacccaactagggcagtgccttcagcacctgctgaggctgacctgggcaacggtaggctccaggggctgtggtttatagaaaccacctgcctgctggtgggttcagaggatggctcacggatgactcctgaaagctggctgggggcccagggatgcctgttaagtctctttgggagtctaacaacttggcttttggcctacaaagcccctagcaggatcccaatccacactgctcttgatgccccatcctagcctgctggggcttgggtcacggccagggacctgaagtagagctggctggagaagacctgcctcagccccgataggtgcctggtgcacccgagtgctggctcttctaaatgccttgcatcccctgtctatcacccccaacaggagtccagccctgcttcgcatgagaacaggcacagccgcacagctgccaggcccaacaccagtatttcccagggaggacaggcagcttgttcttggctcagggcatgcagagatccacttggcacctgactttttttttttttttttttttttttgagatagagtctccatctgttgcccagactggagtgcagtggcacgatctcagctcactgcaacctccgcctcccagactcaagcgattctcccgcctcagcctcccaagtggctgggattacaggtgcctgccaccatgcctggataatttttgtatttttagtacagatagggtttcaccatcttggtcaggctggtcttgaaactcctgacatcaggtgatccacctgccttggcctcccaaagtgctgggattacaggcgtgagccaccgcgcccggcctgcatccagcagcttttgctgggttaggagtaatcacagccctgcctcgttgcttgatttgcaggcagcacccggtacacacccaagacaggcagcaccatctacactgctgaggccaggaccctccaccctaaccctgcagcaccacatcaggaggcactgaccagaacatcccctgccggagccagccaggacattctggttactgacacttaagcgcccaggaaaagtgaaagggtgtggcctgaccaatgctgtcaatgggaaaagggtggcgtggactgggctggaggctggtaacaggcgatgaggacaggtcctgggcgggctctgagctgccttttgagcttccagctcagtgctccccacaccatggttctggctctccctgaacttcattcttcactctgctaagttagctgctacctgtctgcgatcactgcctcttggaagcatatcctgaccccctgaggtgcatcaggtacctcccctgggctcctagcttccccacctagcaagaagtcacctagcattgtcgtgctcctgactcaagagagggaccagaggggccttattctgagtgatctcacctcacaagcaagagagacacctgataaacacacactgtaggaagcaccaatgacccttccaggtccccctccaagctgaggctcagctctgaacccactgcagcctgaagcatgagttaacccttctggcttcctgaggacaaaactataggcccagcaccagcctccccagagtctacgggtgaggaccacttaccggttgagtaggggtccgacttgtggtgccggggtgaatggtggtgctggatgacttgctgaggcttggcaggctgcggcgggggtggctgctggcctgggggcggatgggggggctgctggccctggggtggcgggggctgttggatgtgggtggaaaactgcatgggctgcaagtgcacgggccgtggagggggctgatgctgctgctggggtggaggctggggctggggtggtgggggtggtggcggctgctgctgcagctgctgctgcacagaggggtggggtgggggcggcagggggggtgggggctgggactgcaccttcacggaagggagtagcggcgtagggggctgcaccttctgcagctgctgcaggtacagctgcatctgcatggaggtgaggggtggggcaggtggctcttcatcctccagcagcacttgggggggttgggccatggggggctgtgggagcaggggtgtttgggtcaaggctggtgacacggctgggggccgggcgggcttgggaggcagggcagcggctcggttgctgggccgtgatggctgctggggtagtgcgttgtgcaaagctggaagaacacaacaccgaggcggtgaggcctgagcacctgtggccccagcctggcctttctgctccatcctgacctcatctggactccagtgctctcctactggcctccctcaaactggcactccctccccacctaccgtggcctcccacaaactccagagcagtaaacagcttccagagagagctttagggcggtgtcatcctgccctatgctctgtgtccccagctcctgctccccatgctcacaatggcccttcacgcctcagtgcagaactcggtctctcacttgcccggccattccccaggcccccaggaaggtggccctgtccccatatcccccaggtgagtgctgtccaggttccatgggaggaatcccatctcatgagtgcatcccccaacccctgatgagaaaagctgcagaggggtcccagcttttcccatctaacatgacgcctggcccagcagcagaaataagtcaaaatcatctagattgttactcaaatgatgtcagtgttttagaaacaaaaatcttctgaatcaacgtgttaataactccatgcatgacctgtcttgaggcatctcctttaacttccaagatggcctcgagaagccacagatcttccctctagagaccagagcagctgaggctaagaagctgcccagccagagtgctcggacaccacatgggtaaaccgaggcaggaaggggtctcaacccacactggggcaggccacggctcacctggaggagagaccactgcgtgctggttgagatggggtggagtgctgtgctcaggcggctggggcaggtgagggggcagctcaggctgcggcaggtgcaggatgggctgggtgaagtggccgatggggtcaaagacgctgcctgggagctggggctccaggacgggcacctgggtggcaatgaagggtgggggcgaggacttcatcgccggggctgcctgctgcggcatggagggtgggggaggcgggggtggcggctgctgttgctgctgcggaggtggaggcggtgggggctgctggggaggcgggggcggctgctggggcacaggagccggggcctgctgcatctgctgatggtggtgatgatggtgctgcagacagagagacagacagacagacaggctgatgtcaggcaggcagaactggcccgggccagacccaacgtcccacctaatgaaggatgcccctgagcccatgtaccttcttctgctccctcccggggtgccccttcttttttgacttcggagccatctctgcagaggaaaagagaaggtagtgaggctctgggggagaaggtgagtgagctggccttggatgaagaaagacgagaaaacagggcactttcaggagaaggaccagtgaccctgagaaagggcagccgagttcaatgagggatgagttggtcatcacgggagagggagagacatgcgaggcatcacctacccacttgcctgctgcttttcctagcagggactgtgcctgaaaaagcctcccctgccaagcttcagatcaccacggttgcaccggaagctgagagcttgcccaacgcctcccactactcaagggtcagtcactcactatagtgactgagtgcatggcctggacagcaacctgctcagttttccaacaacctgtgatggttgcaatggtcacattcatcttacagctgagaaaagtggggcttcagaagggaggggacttgtccagggtcacatggctaaaaagcagcttctcgggggcctccaactgcatggccctctaaggcccactcctttccatcctccaaagggaagcagagaggctcagctggggctgagagccacaggacggtgaggaacatatcggcaagggaaaacacagagagcccactccgggagaaaaaaaaggagcaggctggcctcctgggaatgaccagctactaaagaggtagatggacctcagaagtccctgctttgggacacagtcaccatgctgcagacagaaggcagcatacgcccccactcgtgtgggccgacggcttggcaccacagtagggtggatgggtccagggtgtgtctgcccctgagaggtgtactcgagagccagcgtgcccacctctgtcctcaccccagagatttacactaagggacttttgccagttggatgtcccctcaccaaacatggatggtgtacaagccccacagggggacatgagccctggccagtgctcatgggctggcaggtcacagtcgcctgccaccagatgggaggccgggcccatggtatggcgccttttggattcctgtcactgagaagcacctcatggcactgcctggcttcgcctgagctccttgtcagggtgctgcctcttgctgctggtgttggaggacacatgctttgcccaaatccaggctccttccacttggatctgcttcgtggagggccacgctaagcttctgtgaggcacgtggccctcagtgcagcatgccaccaaaagggatggggaaggaccttgtgccctgtaagagctcaccactccacgccagacaagacacagacacagacctcagcagctacagacacacgtcctcgtacaaatgaccaggggctgcaactggggacacgggggaacctggggccccgcctaaaacctgcatacagggctcaggacgctctgggtcagagtatgacatctgatgagagagatactgttgtgggtgagacatgccagaagggaaagcttgagtagatttgcagtgtcagggcaacagggagtctgactgctgtggtggtggggggaggagcgctggctgcagaggttggcagccacaggaccagggggaccctgcacactagggaactgggaagaaaaggccagggcttctctcctggcacaaggaggtgatggagccgcgctgtctgggggcatgctgggcacaccttggaggggacccggggcagaaggcggaaggtagggggaagcagcagggccaccgtgtgaagtccgactaggagaagcctcagggatgtgtccagatatagagttgagggaaaaagtgtgtgtgcaagggaaggatatgctggggctcgcctgttgtctcgtggccttggaagaaaccttgtttttttggttgtaaaagagggatggtcactctaacccctcacagcctgcaggctgtgagcagaggcccataggagaagatgtagggacaaagcgcagcagggcctgtggggggttccagggggcatgtctcagctgccttggaaaggccacagggaatatcctgaggacttgtctccagggccccttgcaagtgctggggcccccaggcaaggcaggcctaaaaagtgggggagagaaggcggcatgtgcacggcagacccccaggaccagatgcctaaaggggctggtggtagaggtacccccttctggcccatgtggtctgagccttgtgtcagagttaccagtaaaagacaagacaggaagtgcacagcttcacaacacaccagccccaagacacccccacacaaaactctctagaaagggttacatgaagatggcctcaagtacggtgtgatctttattccatgacaatcttcaactcaacacaaatttcatctttacataggatggtaattgtacaaagaaataaaatgttttttaaaaatccgattaaaacactgattccacccaccccccagccccactccagtgaaggaggtaatggagggtaaggtcagggcagaggagaggagtccccatctgcactgagcggccgcctcccgcccctcctcaggacccacagccagctggtgcgtcgaggcccggctggcacttcctgcacaggaggctgccaacaagaagtgagtgggcactgtcctctctggctgttcctggggcaccaagcacaggtgacagcttaagtctaatgagctttcaagttcaacaagccctgaacgttctctgccagatggaagccccacgggcaagaaggacagggtccctggacagcgaggttgaaaggaccctggaggagagctggcttgtggctatggcccatgtgcacacgtgtgtgcgcgtgcgtgcgtgtgtcgggggcagcatgcaggcccgacactggtaatcaggctgccatttggtccaagaaagcagaatcttcccagaaagacaatgccagcagctccccaattgtcctgtgggaatctgggcatgaaggctctcctgcctgctcctgtctcaggcaggcgggactgcaacaggaacacatcaggcgcaggccaaagggcagctgagaatagtttgtttggcaaacagagcttaactggaagctggatgcccagaaaggatcaagagcagcccaggaactcctgagcatcaatgcagggccccgggaggccctggtgaggccagggctagcccctgcttccacagcaaatctggggcagttgcagctgctcaagcccaaggagctgaggagagctgccagagttcccaggcaggtggggagcctgcacccaagggcttgcccatggtgatagcccacttccagttccagaagaaggcaggcctctaggaagcacccacaatctacactttaaaaaaggagaaaaaatgaaaagcccctgaaacgcagatgcagttcctcaggggacttttcatgtcaggcagttttctgctgagatgctggatttgtgaccaaaaaagggctggtatttatttttagagcaaaaaagcctatttgtgtctctgggagggcttggatgatgtggccacactcgcctgccccaaccccaggggctgtcgtcattctaagggactgaagacggggaaaatgttcacactgttaacaccagtcagaggtgtccatggggcagtccctgagggtctgtgacaccctctctggtccaccagcccagactcaccccactagaggaggcgggtggggtgaggtggggttggggggatgataggcccaaggcccttcaccagtgcctgcctggcaggtcctgcatactgcagcctggttccaggaggtactttccctatgtgacttgagaagacggaggccaaagaaactggggaaatgcccaccaggcaacttaagcttttggaaatgcacgggaacaatggagacgaaggaggaaagactccaaaaggctcagagtcagcggtggctcgagccttacagggcaccagtgagaagcatgctgtgggaagagcctcactgagccttccagggtctagaggccttgcctctaaagctcccactccttatctaggacagctctagaggtcagagtgttcttccgcacactgaacgagagctctcctggactgatgtcactgcaaggttcaggagggaagtagttagggtccaaagtcccagaaaaagagggatgggacaaagagagaaaacatacttggggtctggctttgcacacagagtagcaccacatgaatgcatgtgttggggattgtcatcaccctccaggagatgccacccacccagaggaccccagagaaccaggaaggctgggcaggacagccaggcagtctttacacagagaggcctgggcggctggccaggcaggcagccttcccgaaggcgggactaggcgtgtgctgctggacatgactaatccaccccgggggacaggcccagggctctgaggaattccataacttgatggagtcctgtccctttcacggaagaaaatggacttaagctatagcttgctgggaaggaatctggaactgaagaccgttttattaagagtccgtgtccaatgattaggcaggacctacgtagagggagagagaaaccagtgtgagagaaatggtgtggaatgtaccatttaagtcacaagaacagaagaaccgcagactgagccaacctcctgcgccctggtggctgatgggcacaagaacggcactggagactggagccctgccccgtgcctggctaaccctgggtagggacagacccaccgcccgcttagaaaggtcacagaggcagaatgcatggatgccttggaaaccgcccccagcctgctcagcttctagagagtggccctggttcccactagcaagctccacgtgtgccctgcctgagcgcacgccggcatttcctttactgccctcaagtggcttcttttgaatttgagtgatgcccctgccctgtcccaccagccaggtgtggcaagcccaccaggcccctgctgactctgagctcatctcacccaggggctgtgcactgtctagtctcaggaaggcgatgccagcccttcctcctgggtctacaagaaaggaggtaccagaatgcaggacccccagtggaggggaaagagcaaacagcctcatctctgcattcctccagatcccccaaacaaaaagctcaaactctaaaaagcagaacctattatatacactgttgaggaggagaaaaaaaagaaaaagaaacaggctaaggaataaagtcttgtcctttctttccttttttggggtatccaacatggctccctggaccagggaggggcactgggcttgttcccacccacgtagcagagcggatgcctctgctggagtcacggatgcaaccgacgtgctactccctggcccctgagtgcgggcatgggaaaaacccgcccactggcggcctctcactctgggccacattccacaaggctcgccctcacccgcccatgaagccccagaatccctccagctgcaaatgctggctgtttgtggggggagtcacctggctgtgcagacagaaaggctactgccctatcttcaagtctcttcctactcccccacctccagggtcctcaccattcccctaggtaagcgccacactctggagcaggcaagcagcaggcctggagatggactaagtccctcaaagaccctgggggtcaggaagctgaggctggttgtgtggtaagaacgccccatggcctctgtctgcacttcccagctcaaatctttccaaaacatcaagcattcctttttcccctggagctattaagaaacacccacatgctccaatcctgggaaaaggaagccaggaaactaaaatagctggactgcgctcccgttccaactagacgaccagaccaaagcccaggaggatctctcacacctccctgagaccctgtcccagcccaggtagctgaggttaaacgggtattcctaagagggacataagctgtggggacacttctgctcacaaagacctgtgcatgacacttgggaagaaccagatgtcagctatgtgacaagtgaaagctagaagattcctaggacatgccctgccccatgtgcttggcagacctaaccccagtgctaatgacagcaaagccacagtactgtccacagcccacctgggacagtgtcttcctccagcctgctccacccaggtctgcagatgccctaggggtggtgggagagtggcatttgtgccctacccctgcctgtctcaatacagaatcctcaagcagctccaggctttagctggaatcacagctcaatggaagaccacagcccaagcaatagctggaatcagaggaagtggtagggctggcccactgcactgcatgctgctggggcagagggtggggaatacatggtggcctgggacacagctgggaaagcagcacccacccccgccatcctcctcctgcctgtgttccgttgctccctgaactagagcctggccccagaggaccaccccacgcctgcatcagtccacagcatcccggtctatggatagctaccaagaggggtgttcatgtatcacaccccccagcctcaatctagtgactccattcgttttcttctggtgattcatgtctcagggccgttgtcagcggaactaaccccgtagtataagtgacaaaaataggccctttcaggaatttcggctccaatccaaatggaaacacaagaacgggggggggggggggggcgggggcgcgggcctgcaaatcaactaggcaccaaaagaccaaagggaaataatgttcccccaccctgacccactcccgttaaggcagagctgcctgtaacgggccatggacatcagggctgccgggattcctggacccaggagagcagctgctgaaggagctacgccccctctgccccccgccctgagagtgcagagtcctgtgcgggacagggcagcagaaggctgtatttactggtgccagggtgtgggttcccatttcgggatctgccgtacgaaaccctcgcagcggcccctcctgagaggagaagcaccctgccggcccacgacagagctcactcagtgcacacagaaggcaaaggaaagcccctgctggccaggattgggaagacaaaagggagccaggcaaaacccaaggtggggagggcgcctgggaagaggggaaggccagagcccagatagctgcatgagcggccagggctggaccgccagagcctgggagcctgggagccagcggctctgagactgtaaatctcgccctccttcccgccaggacagctgttcccaggactctcagattacttgttgcacaatctttccacttttttttaaagtgggggagtgaaaaaataataaaatctcggcagcggcaggaggggtgtggggcactcgttcaggaaaccaggagcattcccactcctctcccaaagcagaggagcccagaagagggacgcagaggccaagggcaaaggccatgatcacacactggaaatcaggatgtgatggccacagccctctaaggtgtcttgtcttgtgagggctaaagcagcacactgccacgaccacgtcatgtcattttagttaatcaggtcccctgacaatttcagcatctggggtttccacttggtcactcagatcctcagatgagaagactacaaaacccctggtaggagaagtcaactagaaaacaggaggtgcaaaaacccagaggaaggcaagctggaggcttggctggcatggaaagtgaaaagtcagcggccaccaggaatgctaattggatccaagaatacagccattcaccccagtcactctgctgcgagtgggggccctagcttcgggtggcaaagccagcccttcctgggcagccatggggtgcagtgcctcctgctggctgatggattacaaaagcagtgtggggagagtaacggttagagatgaaagggtgaaggatggcgacagggaaggccaggaggccagtgagctgcccacggcattctgcatgcagttgtggtagagaatgtgggcatctggagtcctggagggtccttcagcccacttcaaggcaagtctcctcactcacctgggaagcagagggcaccaggctgtccaagggaagaggaatactgacaaggcccgaggtgccacctacccccaccccatctgtgcacacacacctcagagcaacatggctctccccagctgccgtgaagggtcctcaatcttccttggcacgatcaagttatttacatgcactgattattgagggttagcatttatttctagttagaataaaatcccagggatgggacaggcccgtgggagaacatgcaggagtctactgccaaaacacaggtttcccactgtggatccccactccccagtctgcctgagaccctagggccagctctcaggtggtctgcagcacgccagctcactgacagctgcaccagcctagcggcaaccccgttggccgtaaacacaggatgttagctccatctctcagcaggggctggtcgccaggccttctgggcaccatggctccctccctagcctctcccctgcgccagcctgagcatctgcgcccctgagaataatgaggaaagtgcacacttggaggagagcagtcccctctccactcccacctggcacccagcatcactacctgcctccacctcccactgaggctgctgctcagaaggtgggctctaatggggaacccagggtccaacgtgcagacccacggggcttgaaaagaagggactgttagttagaactgcaggagggacacgcaagtccaggtgcgtgtggagttagggcagattcaggagcagccaacacagcaacgagcacactctggggaggggtaggcaatggctggggcccaggtgatggcagggccagcagcagactggcgatgcggctggccagctgcagtctgctccacatccaccagaaaccagcgaagcatctccctgaagcggccgcactgcacgtgactgtgatacggggaaggccctggggacacgaagtctccactggtgcagaaagctgggtgtggtcacatcaaggtcaacagcacagcctggacccccacgcccacagtcctcatggcccagcttccccgcccaccatccagggctccgcagtgtcaacgcccttggccattcatcctccatgaccagaccctggcagggagagcataacggccaggccgagagaatggacactactgcacagagtgcagggctattcatggccccagggagacagttaacaaagagacagacagacagaggaacccagcaagttctgggagtgccgtctctgggctctagcatcctggacacaggaccgagctagtgccaggcacaggtgggaagagtttggtaagacacgtagaacacaagtcacctaacctgtttcggagtcttcgctgtcagaggagctggactcactggagctctccgactctgaggacgagaagcccttcatcttggaggagccggcaatcacatcaactttctcagctgcaatccaagcaatgggagctggtcaggcagggctgtggcccaggaagccgctctaagccatgggcacaccccatccatctggaggaaggaccagtgaggagcctgtgcacggtgggcccaggggctgctcccaactgccagctgccactcccagaacccacgtggtcccacagttcccatgggtagactgcttacaatggaatttcaaggttccttcaatctctcaaaaagtctcctttggggggtttatcaaggattcaagagaccaggcagaaggataatttcctaacacaaggtaccgctgggcataaggcttggattctcccagttactcttctagcaggggaagaagaagatccaaaaggaacatgctgccaaaaggtaacgcaaggcagggagagacccccgggggtctctcagcacagctgttcagacgcacgctggaatcatcatgtggtgtgccccaggtaggggcccaaggaccccaggagctagtcagggctggggacaaagactgtgtgcaatgccctgacaccgatcctcagaggaaagccgtaggccaggatgagctgtgtgacacaaaagagctgcctggaagagtccagaaaggatgccacaccgaactgtccctgctagagagggacagaggctggctcagtgctgcataacgtatcggtacacaggtcctgggaccctgcagacccgcctttcctccttccccaaagaggccggaggaagactcagcagcaggtagcctgggttgaaagcagctccggcttagaacacagctgcaggcaacaaggtgcagagaggccccagacaccaccagtcagatatgtagaaaggcactgacagcctaggggtgagtgcaatgtcacaacctttcggaggtttctgtgtcaagaacacagatattataattggaaaaaaaaaagggggggggcgcagaaagagtggactgagcaaggagggaaaagttactctgagggtgcccacagaaggaaccccatgcccagggggcccaagcacaccttgaggtttccttttcttccgcaaacaggaggtgacatagcgctccagctcacgcagtgtggacggcttcagggtctcaaagtcgatttcaatctcgtcggggttggaattcttcagggagggctcccgtgactggatgatgtgcaccacgcggcccagcttctcgccggggagcttgttgatgtccaagctgagctgccgcttctcctcataggacataggcttgcacttgtcctcttcctccgactcatacgtgggagggggcttgctcttcatgggcgctggctccttcttgctacgaagggacgatgcagacaccatcaagaacgggccccctgaggaagccaggcactcattcctccacatgtatgttggggggaaggggtgcccttcccataccccccacccaccagccttcacaggaaacggggcatgggcaactcaatctctgggagcacccagtggagaccgaagcaaactgtgactggaggctgcccaagtgggggatgcactacagccccatccttgccgcctatcctccccaaccaaacatggtgagctccgaaggctcatcctacagaaagaggcagagacagtgcagctaagtcctgtgtgcaagtggccaccagcctggcctgtgaagccacggctgcagaggggcagcctccgcacccaatgaggacagggaggggcagtggcccacacagtctcagagcaagccctggaaggagggtccccacccaggacaaattcaggggacacagacctcacattgctgttgctgctattatttttcttcgtctttttaggaggaggttccttggctttgctttttttattctcttccacttcctctttccttttgtgcttttcttttttcttttccttcttgtctttctcctttttctttggtttgttctgctggggctgagagagggctgcaagctgctcgtgcacggctttgagctgtagaccagacaggcaagacacacactcagggctgaaaccaccttcctgtcacccaagacccaggcgtctgctccaaaaaacatgcgacagcatgcacctggggcatcagggtgtgggcataggggaggcaggggaagggaaggcccccagctttgcgcctgtcatgttaaccagattcctaacaagactatctccacccattcactcaactccaaagactgccagtgtcttcctcaccagaggagctgatcaagccgacagacaccaagtctcacggccatcctgatcgcagaaggagggcccctaagaatctaagtaagagcacacggacacgtcaggcacgaagggcctgatgactggctatagggagaggagcaaacaggtagccccaggagagacgaacatcctggctcaacctcctccttccagatactgaaaggatcaagccacctcctctctgcccagaaaatggccatgtccctccccatccccaaccgcaagctcaacacatatatcatacatacgtgtatgatcaacatgcatttgacctagcaaaggggaaaaggccacaggtggtccagtgggaattatgctcccttgggaactcagaaccaagaacatctcttagaaacttctggggaggccaccctggtccacggactctggggattaagaatggagccaccaatgccctcacctgctcctggagctcagccagccgctgggctcgctcctcctcagagtcatcagtcgaactgtcactgtccgaggagctatcgctgctgctgtcgctggatgagggcggggccacaaccttggtgggagggggcactgccggggaggacacggccaccactggctcctcaggctcgtccggcatcttggcaaagcgcatttcgaacacatcctggtgagggaaagacatgctgtgacggctgctgggtacccaggccgcggcctagcatcacctgccctcattggctgctggggccaactcaacagaaagcaaccgagggcgaaagaggatggtgatcctgtctctttgctgccgagacaggggcaagggccagccaagggcctctgacaactcttgcaacactcttctctcaaatctcactttgaagaacaaggtggtccagagatagcggggcactcactccctggaggacaccgcccaggcaaggacatgagacccaggccactaagacagccagctcactgaagtctgagatggtactggaccaagggcatcctcaaaccccaaaacagttagccgaggctcccaccagatgcgtgcgggggagcaggagttgtctgtggtttgagagggcattccaggcagaggacacagcacacgcagaggtccccggtgggaatgtacctgccacaagcgcacctcctctaggggactaggctctgctgtagcagacacggttctaagtcggtctcctcattcctcagatagcccctgcagcacttaaccaagcagggctgcaccactggaggaggcatctccagcacacacaggacaaggtaagagaggtttaggcagcaggtgtggggcactgaggacaggctacaggagggagccactgtgcgcaggagaccctaagacctttcaaccctaagatccagcaatcagatggaaccacgtggggtcatggagctcagggaacagcagccatgcatggacactggggtctggccacacatactgccagccagctgtcaagtccctgccctaccccgggggcgctgtgctcaatccagtgatggctcaagacagaggcagaagcacaggcctggcttcccagcaggattctgggacccgcttcaaaccaggaataaactgatcatcgtggaaacacaccatggcaaagaccttcccccaaatgtgtgtcagtgcttcagagaggaccacggccctggaatcccctcctgatggctcaggaaacactccttgaggcttcctctcccacgctgctggagcaggcatcccatataactgtggtgttgattccctcccctccaggacacccggagtatgacttcttttagccaataactttttttttggagacagtcttcacccaggctggagtgcagtggcgcaatctcagctcactgtaacctctgtctcccaagtagctggaattacaggtgcacaccaccatgcccaactaatttttgtatttttagcagaggcagcgttctaccatgttggccaggctggtcttaaactcctgacctcaacagatccacttgccacagcctcccaaagggttgggatgaccagcgtgagccactgcgcctggcccaataacttttttctttctttcttcttcttcttctttttggagatagggccttgctctgttgcccagggtggaatgcaatcaatggctcaatcatggctcactacagcctcatcctcctaggctcaagagatcctcctgcctcagcctccttgagaactgagaccaccatgcccagctaaatttttgtgcagacagggttttgacatgttgcccaggctggtctccaactcctgggatcaagggatcctcccacaaggtggtctacaatgaaaagtgccaggattacaggcatgagccactgcacccagcaaatacctttattcagaaataactccttgagcaggtctgagacaaggaagaagatacacaacaagggacgaccagaggccatcaccagttagcctcccaggagtggggcccagggaggaaaaggtggggggcttcacatcagagtggaggccccagtgagagagtaagacagatccctagccctgcagcacccggctacgtggcaggtgggtagtgccctggatgtgggtgggctcaggtcccaaaatgactccaagaggcagctggggccacatgagcttctggaagagccaggcctgctgccaagcagcaggaagcaggttagagaagtgggcctcagaagtgccaggacatcatgaagggagataatcagctatgcctcccaggacaaagggagtgccctctactgagtggtagctacctcagcgaactggtctgtaagcctgggccagcttcaagacttgaggatgtccttgttcctccccaccaggtgatgactgttgggtaaatgctggggtgggggtgtgtggcattcactctgaggcctccttccattccctgggtgctcatggccctggctctccaaaggccccaacaacaaagagcaaaaaatacaagacacaaagtcagctaagatgagaaactaacattggtgggactgggaactgccagcttcctggcgtgtccagttgtgtgaccctgtcatccttccctgtctcttggatgtgagaactcttgttgtagcctgagtggggggcatcctgggaaacccacaagccagtgggcccagggctgctgtaggaaaaccttgctgtgtggcttcaacagtcacaagtctccaagtaccagcttgatggtagacaggaatgacgagctccctgttcaaggagctcagtctagctggaaacagaaaggtgaatgaacacatgggcagcaaggggttgccatgaactggaagtgtgctgagacctaagagtgaaaagaacacagtcaggggtgctatggggccagcaagaggacagtaaagcccaattcaagatgcaccgaggcaagcctctcacaagggaggatggtgatggtgaggggtagcaggcaccagcacccgccagggaacaccgagtgcaggcattctgttgggctgacagtctcttgagacccagctgaggcccagccccctgcccggcatcccacagacctacacctcactcctctggaggtctgggtctgaggtcatgcttctcagtttcagcacacctcactggtttcagacaagtatctcagctgtcaggctgtggaacacaggttttctcaatgacccgagaatttagaggctcagagagaaaaataaagtggctccttttccaagtaactttccagataatcccacttcttgggcccagccaaattaagagacccaattaagcaggtcccaatagctcctgaagaagtgagcaagggctggaagctttgtccctccccttccctgatggagaatttgctctctacctgctgatgcagagaaagtagagagaagtaagaaaaacaaagcctgaaatgccacaaacacaactgcccactgaagagaagcctgctctggaaccctccaccatcaactctgttgctcaaacagaaacacctctaccaagcactggcagagaggtgtccctcccaagggcaggcgaaacaggctgggccagaggcagcccacctacagcaccccccaccccttgcctgcactaggcccccttgagattgaggcctgtgtccactccagtccggcacctggagcccgtgtgtaggaagaaactctactgctgcagtgtctgtggtgtgacagacatccagtggccttggtaaactctacattcaggcaggcttactcccctctcagaaggagaaaaatgcaaaaaaaaaaaaaaaaaccacttaaaacccaaaaatctttgttggagaaaatctgcgaaaaggaggtggctccagggtgtcaggagaggacagaaaaaatgagacaaaaatgaggaaggaagggctagaacacatcagagggtgctttttcttttctttctcttagtaaagtagctcaaaacagtcacctttggtgctggaagagaatttgtttctgctgagttcttcctatgagagtagatgaagggcatgggtatcaatgtgagcagtgtgggcaaaagctgcgcccctgtcttctcaagagagtgggagagagggagcggtggaggagttgaaggcaccaatctgagggcgccactgccaccgggtggccctgaacaaaaactgcattgaaattaaaaagtctggccgggcacggtggctcacgcctgtaattccagcactttgggaggcccaggcaggcagatcatgaggtcagaagttcaagaccagcctgaccaatcggcaaaaccccctctctactaaaaaacaaaaattagctgggcgtggtggcgtgcgcctgtaatcccagctactcaggaggctgaggcaggagaactgcttgaaccaggaggcggaggttgcagtgagctgaggtcgtgccactgcactccagcctgggcgacagaaagagactccatctcaaaaaaaaaagaaagaaagaaagaaagaaattaaaaagcctgaactccttcaaggatgggaaatgcaaacatgaatgatgaaggggcaatgttgtttgtgaagaaggcacacagacaacaccaaagtgaagagagggcaacaattccccaagtcacagaaaataaaactaagaaacaggccaggtgccgtggctcatgcctgtaatcctggtagtatgggaggctgaagcaggtggatcacctaagcccaggagtttgagaccagcctgggcaatacagtgacatgccatctctaccaaaatacaaaaattagccaggcatggtggcacacgcttgctgtcctacctgagaggctcaattgagcacagcaggttgaggctacagtaagcagaatgacaccccgtttccaaaaataaataaataaaaaaaagtagaaataaaaagctccaagcctgagcatgcatttaaataacaagagccacatccacactagtaagaaagagaccaacaaacttcacaagggaagtgtttatcctacctcaagagtttgagcacatgtcctctgaacccaaggcagcccctgatccacagagaataggagagacagtgccttaggtccagtgggagcaggtacgggctgctatgctggggagtctaggacaacatgagaactagtgcagctgggaggcaggcaggcagtggggctctgcctggcaccgatccacaggtcaccaaaggctttccaagtcctcacttctgccctggaagcagatggctgcgacagccaggtgtgcagaagcccgctgaggcctacaatgagcacatcagcacctcatgatggctctgaccctgagaacagaagcaacccatggccttggggagaagatgctgggaatttttatgatcatttatctacagtcttaaagaatttaaaaaagaagatgagtctctaatcccagcactctgagagtccgaggcaggtggatcacttaagcccaggggttccagaccagcctgtgcaacatggcaaaacccatctctttaaaaaaaaaaaaaaaaaagaaaaaaaaaaagaaaataaacgaggcaaaattagctgggcatggtggtgcaagcctgtagtcctagatactcgggaggctgaggtgggaggatcgcttgaacctggaaggcagaggctgccgtgagctatgactgtgccactacactccagcctgggtgacagaacgagaccctgtctccaataattaaaacaaaaaaaatagaaaagatgatgatgatagtactaaatattgactttattctccaaaatttttaacccaatcttattattcaaagaaagtcattttttaaacttaggtatttttccttttttaaaaaaattaagtttacacatctatgctgtaacctcccctccccgcccacacgtgtacttcacactgtgcaccacccaggctctcaacttgaaggaagtgacccaggacccccaatcagaattgtggccatgtggaaacaaccactctgcagctagaaggctcttacggctctggtggagggatgtccacagtgcagatgtcctcagctcacgactgtgacagcgacttctcggcaagagtgccccccacccccaacccacttgagacaggtgtgttttgtagaagagactgggccatgcacagcacacacccggtcttccagccaaaagcaaatgagtgctggtggagggggcttgcagtggaacacccactctgctttaattgaataaccccaacttaaaatgtatgcactaggctgactttaggcacttttctaaagcaacatggcattatcccaaggaaagtgacagaaaaaaaaactctgccaaggcccacagaagtctgctcccacgaggacctcagcctgctctgctgagggtggctgcgccctcccaagcctcacctggagcttgcgggccatggccaccacctcatggtcaggagggttgtacttatagcagttggagaacatcaatcggacgtcagcaccaaactcctgagcatcacggtactcacgggcctccagtttagactggaaaacaagacaagtccctgttagctgtgtctgcccatgtgaccatggagaagtggctggcagcagacgaaagggatgcctagaagagcaagttggtttcttggctctcagtttggtcaagactctagtggggggacaggccatcaccccagttctcagcctcagggctgggactggccctgccaacatcccagctcacctgcctggctcgcaggcaggtggactcagaacccacaggaggcggagcctgagccagaaatgacggggagaactgatggagagggctgggcccagctcatcgtgatgacacagtacaggagctggtcaaagggacacagcactgttccctgctctgcctgccccatgcttgggactccactcccagaagaagaaacacgtaacaagtcttaaaactaaaaaagcctcaaaacactatggtgaaaatgtcggcacttacagcgtgcctccaacacagaggagacagcaaggccttctccaccacaaagaggctggcaaggccgccaagccccaactcccatggagcatctactgtgtgggcaaggtacctggggcactgggcccccaaggccagagggcttgtcttgcttttcctcagactaggggaaggggcagcacaggcatctgtagccacaatggccaagcaccaggtctcagagcacgtcccacagcagacagcagggggcgctgagtttcttcgagttggcgggaaaaatccacgcagccaccgttccagggcctgggcttcctcttggactaaaaggtctaggaaggttctgatgtggagggacagcctgcccaccttgtcccttccctcaggcacatcccgctaaccttgattgtgctcatgtccatggggtgcttgatgatgtcacagtagtcgtgtaggcccagtgcctccacgtccacaggcttgtagaagggccaggcgtaggcggcgtgcttcttggcaaacatctccttgaggatgccgctgcagcacttgagctgctccgagaccttgctgctcttctctggtgctgggtgctgctgagagtcgggcacgtccttctttggaggtttcacaggccggctgctctcccgccgctggcccagcttggtggtcttgggctccgggggcagcgagggtggctcgtgaatggggtcaatggtggtgggggtggtggtgtctgctttcctcttcactcccttctttgtctgccaagaacacggacgccaacaggcacagtcagaagtggcagccggcacagctgccctcagggtcacccccaaagccaggccctgtcttggggcccatcgctcacacagaatggacccaaagataattgcacaggcaaagggccaaggacaggcagatcgtgtcccaccactctgctctgcagctgggacaggacctgcctgtggcaggagaaagcataaaactgtgtgctcacttggaagccaagggacctctggaggctgcttagtacctaacaccagggcctctccccaagtgcccaggggaggcacaattcagagactatttagatggcccatctgcaaatatgcacagtctaaataaaagaggtgcagggggcaggaacccactaggaggtgtgacacaattatgggacctttgagtcagtggggcggctgtttctgggctgcaatttcaacacagcaagatctccccagaaacacccaccagtgcccgggacccaggacaggctctgtgtaaagcacgggcaaggacagggccgctctcctccctggtgaagcagccctccagagtccaggagactcaccttcacaggctgtggggtggccgcgatgatgggtgggtggctctgtacgggctggggagctggagcgggtgggggttgtggctgggggggcactggcgggggcgtctgcagtggctggggaggcaccactgtcatgacaggggtctggacgatgaggtccggggtgacggcagggaaggggtgaggcgtggcctgcacaggaggaggattcggctgaggggtctgggtctgcggaggagtcgatgcttgagttgtgtttggtaccgtggaaacgccaggttttgctgtccctacaaatcataataagacggcgagttagagaccatgctgacatccacatgctggctgacctcgtggggacatacaccacacacagtgaacgcacattcgcgtgttgcatttgcctgagagacgaacatcccagactccactctgccaaacccttccacctgtccctggggctcaaagaacagcagaaaaccgcacttcccatttcctagggcgtcctggctgcaactcccaactcaggcacaaagaccccttcatgaagcctggaggcccaggctcaaggagcaggaagcacatgctgacaggggacagagagcgggaaaacactcctcagagcttccaggcacagctgcccttgttcccagaagcactgccttctgagtaagagcttctggcagggagccggcagtagccgcccttgccaaggtttctggaaactggcaggcccccacctcctggaaccacagggggcagctggactgctgcccttcatgactggctcgagcgctgcctcccagcagctgtgcaggcagtccgaacacacaatggtcacgtggcacacccaaccagctgcaaaaagtgaggggttatggccagagctctaacaaaactgggtggaccagggtgagaatgtctaggagcataacctgggtcaccacatccttcgtgtgcatgctggctgccatgaaaatggacaaagacacccagtgccttcatctatcagctcaagcagcacccatgttccctgtgcatctcaaggagcaagggtgagattctgctgagtttcccaattctccttcctcaggcacaactcctgggcttctcccagactggaataggagatgccaccacgtctgtctgcccagcgtgcagcccaaacccctggtcccagggagtgaggaccaatatcctcatgtaaggataagggatgtgacttacatgaggatcaggaatgtgatctgataggtacaagagccacagggtgacacgtgagactagttctccttggttacctttgggtgcagcaggggatgtagcaaccccctttctgccaccacttcagaacagcatgggaggccaggtgaaaggctgctgctcagagaagcaaacaactcacactcagggaccacctcgcaaatgtcacccttctgcagcatggagttgcaaaggacaagatgtagccagtagctgctggagagtttcctagacagaatcatttcctagagtgggcagctctgccagctggcccctggaaccctgtgtcagttgggggtggtgacaggcagagatggatgaggagggctttcacttcagatgactgagcatcagaagcagggataactctgacaccagtgcattaaggtaattccaatcacaaacctcaaagtttagaactgagatgttagttaaaatgatttctggtcatgttaatgtccttaaaatggaaaagtaaaaaccacctatgatactggcagggtgaagtgttcaacaaacgtcaaagtgctttgagaagttacactttccttttaccctaagtccatcacctaccctcagaaaaggcagggcccaattatttctgcttagaagaggccacagggccacatgaccctatgggatggatccaacaccaaacccaatctcacatgtccaaacaccaacacggcatgcagtatataatgtcacatcctcctgccactcccagccccccaccaaacttggaaaagggacaaaggtcggggagaaagccaatttacttgctatttcagtactctacctgtttctttcctcccacgtcctcttccttttgcctggactatcatgatctcggtttcttctgtgggtagctcatttattttttgcaagaagagcttttccagagcttctgccattaagactatgtcatctccaggctggataaggagacacaggggtagagtcagagggccctcccctccccacctctgtagacagggcaccccatgccacccaccccctgcccccaaaacatgaagcgtcgtattccgggtccttccccgatctgcacccaaaggagccacaatggctacactaccaggtatcacagaggcttgtgttcccacaggtgtgctgagcctacacttgtctacctgcacctccctcatcttttaagctctggcctatctgagaagccatcctaatgccttaagcatctaccaagctcagccaatcactgaaaggggccctcctttgacacaattcaatttcaccagaaatacgtgaatgacacaggatttcttgccatgatacattagcagggccccagcaatgctccccaacgtacccccatggcagctcaccaggactctgggcactgcacatctcacactagttgaggggtcccactctgtcacctcatctataacatgctgttcccactcagttctaaactgagagcctggtctgcacattttgctcaaacctaagtggtgagagctgagactttaaaaaacacagtaaacttcaagaaactcacctacccatctcttctgggcatttttacccactacaccagcagaggtcaaaagctgagttctgtatagtgtctccctccagagtcgttctatttgaaagggttgattttaatcacatctgtggtctgaactgtaaacaaatgatctggcttcatggcacagccgagccgaaaggtttggctacggggttaggaagtgaccttcaggtctacatgtaggatcggggggacacttcatctatggccaagagttattgacagtcatgtccacagttccagcagaccatcacccacagagcaactgagctctgcgccggccccatcacaccctctctcacgtggaggtctctgtttgggcacacctctgcacaactacattttagcaggctctttcctaacaatttacatcacccaaatggactttgtcatgagtcgccactattctcctcacaccttctctactagacatgctcaggaaccaaaatcccaagggcaccagaagcacatgcttcaggctaacaaggacagcttgcaagttcaacatggccagcaccctcctcccagcaaaaaagcccacacccagtcacaggaacaaccacaggtctcattacctctacctccaagggtctcctcttgccagactccaagcccagccacacccaacacccctgcccacgggctcctgacatgcccactgccgtcgcctcccctcctctctccccagggcagctggacacccacccctacatctcaccttgttgtagatgtaacaatttgtaaacatagtgttgaagtcctggatacattcctgagcattccagtaatagttgttttccaagcgcttctttattgttcccatatccataggcgttttaatgatcttatagtaatcctggagagcagagagcaaaagtccagtgtcacctaggcagccaggcagcacaaacgctgggctggccaggctggcctggggacctcacccctggctgctccacaggtaaatccacgggagccacagctcctactggcatcagcaagtgatcttgagggggaacaccaaaataaagtggagcggggaagggttcctggatgctggggagtaattcagagggaaacgtacaagtttccaaccactctatcttgaaataggctgccttcattgaaatgcacattttttctttttatggatactaaaatattctttcacttttaataaataagggggaaaccaggcagccttttaaaaagcaatcctcacctagtaagacaacccatggcaggtcctacttgtcccatttgaaattttacatgtccataaaatgcaaattcccctggcgccaatgctggagtccacttgtaacccttgaccctggcactcctgcctccttgtcaccatgaagagctgcggagcataagtttccacccctagtcaaattcactggacttaacgtttctttcatttgcacacagtctaccactaaggattctttagtatccagatactgctgactgaccaggttaactgccaaatgacaaatctggacagccttcacaatccttagtttaaaaaaataaaaataaaaaatccaccatcccaaccctcaaactttcagatcttactaagtgccaaacagaaggagccagataacagatgtaaacgtcttaaagtgcccgaaatcaaaccacgttattctcacaacttcttctctaaatctaaacctattctaaaactaagttcatttttaaaaacaaccacagaaggaatgtgcggacagatcaagcagtgcctgggtttccaggtgtgaggatcacagagggccaggcagggggctgcacccagacagcaagtccccaatgactagaccagctcaggctgttggcctgacccaccgatagccaaactttctgagtcatcactctgactgaggacaggtgctcctgtaattaagttcaagtggtgtatcagaaccaaatccaagtggagtcccacggtagaggcacaggctgcaggtggagaggctgttgcagggagaagagagcaggtatactaacagcaagcactgaggccctgctcgggatggtagtggacagcgttggaaaggccagcacagggtatgggtgtggggtttttgagatgttctgacatccacgagaaagagtcaagggccacctgcttacatgtaaggttttggcacagctcatggaactgccctgggggtgagggctacaagtgcacacccaggcaccttaggcaagtggtcaagaggggagactggaagcagactatcggtgccactttctatgctctgacctcctttcccaagagaaccaagtctgaatagatctatcccagtggaaatttaaattttattctatggccaaaggccactgaattggccacagtgtgtcacatgtctcaatggccaacagaatagtgaagaggaattggggtgaaggcagagagaacggtgggggaagaggaactgccagcctggatagtacggtttggggccatgataggagatcaaaatgcgggtgaagacctagaaggcatcagaaaacagacaaggaatactttttagggtggccttattaacatctcctgaagaaggaagtccccagaatacagatttagcatgatgatgctcctgatcaagcatcccctttggctcagcccccaccaaatgccctgagaccactctcactcagcaagctccttcctcagctcctcactctcccatctctgaagacatcagatcagggccaccatggatcagtcccttcttcttatgtcagagctaatgagggcgacgtcaacagtcatagggacaggtagattcacactctgcctggaccaagaacgtcctggccactctccagcctgcacttcagagactgaccttgaactcccaaaccccatggcctaaccaatcacccatacttgtctgtcccgctggccagcactgttccctcaacctcaactgggatgctgctgcttctcggcaatctcaagtcccccagcccttccttctcctgtcttcaccttctcagccctccctgcttcagttcccactgcgttttcttgtaacaagctgacccctctgctattctggcactgatgcgtttcccttcaaagccaagcttcttgaaatggtggcttcacatcctcaccttctcattcacaccgtcgcaatctggtttctacttctgtgtcacgtcttcctaaggtcaccaatgccctcctaaaggtcaacaggatgatcaggtcggaatcctcatctctttgacctccctgtagcttctgatgttggaatctggggaaatgctctcttctgtaggccttctgccttccctccaacccctaagggcctcacaacgctctgggttccactccagtccccagttccttctctcctggttctgtgcatctgctctgagaatttcactctcaactatggaccctgtccagcccagctagagattggtgcagtgagctcccccaacagtctccctcccgcaggccaacacagctgactgcctccactcctcatcttggtcaatggagagcgtggcgcctcttctgcctccatacctttcctgagccatttcaagacccagacacgtactgccctgttctgattatcttcccccgagtgcttgacacgtattcagtgaagcaatagcaccagacagttcttacagacacaatgactttaaacttgggagtaaggatgcctggcagaggctaaggccgctcctacacaccagtggctctggtgtgcacacaccagtggctctggtgtgcacacaccagtctgggtcagtggctgcaaccacctaatgcacttgccagggggtgtacaggacttggcaaacagcaaaggacaatttaaagacaattagtctttggtgctttaaagaaaaaaaaactgaagcatttattccatctgctccctgaggttcagctggagatacaggtttgcttgcagaacagtttgctagggacatgggcatatggaaaactctccagggaaagagaagaggggcgggctcacaaaagcacaagagcaagtgtgctgtagccagagggagggagggcaacaccacctgtgcagctgcagccacagccacctttctccaactggggacgcctccatgtacttgcactccctgcgaggtaatcccactatctttccccaccgtgtgctccgggtgacagtgacgatgatgctaggtgaccactactgcagcaagccaattcccctctagcatagtttgatcaactacgtctacttatccttgatcaactatgtccacacctgagaaatgaaggggctaggatggccaagtgctctgacttcaactcaccatggaactggaagtagatctgtgggccttcctttctcccactgcttcaacctctacacaattttccccaggattccaatatctaagaaaccagttattgttaagccaattagctcattctttctccctgatttcaactgatcagaactgctgaaaccactcactcaagggccctgcagctctcaccatgattccaaatgcatctcctaccctccccccaggaactgccctgaccaggagacatgcaggagacgacctccaggacggccaccctgggccctgcccacactactcacagggaggttcagcttgacggcatccacaggctgctggaaaggccatgcaaactggtgtttccatagtgtcttgagcaccactctgagcaggtattgcagttggttggtctgcctcttgggcttgttagggttggaggtctctgggggcggggggttggtgctggctgcgttggctggctggggttgggcctgggcctgtgttgtagacatttgggaagtttctagtccatcccccattactggcagatttctcaatctcgtcccagggccgctctccgcagacatgctagtgatcccatcacattcttcaccaggcactctacaaaggaagagaagagcccccgtgagatatcagtcagcagatgggcaccgctcagaatgacaagtccctctggctgtggtctccaaggactgagttccctggcggtagctagccaagttggccagagggaccaccccatgctttgactgaaagggttccaatgtctcctctccccaaagacttaccctccagcagggaggagaccacaaaccaacagaggaggcagagtgaggtggtgagagcccactaggagccagcaaaggctctgggaactatgaaggtcatggggaaggatgtacaatgaagccacgtctcacaaacctgcacatcccttttcccacctgtgagtttttaggagatgctgcctgtgtgtggaaggggatgatgtgcaggctcccacatatgacatttacattaaaactccttgcatttatcacacacaaagcatcgagcaaagtcaatcatttcatttggtgggccaggcaaggagaagcaggaaggctgggtctgcccacccatggatggcccacccagtccactgccaagtgctcagggcaaagccacaaacctactaagaatattttcttggtaacttaaataatgcaggtctgctgaggaaagaatctgcatgtttactgccgataaaataaaaatgaatccatactagacctaccattttcttttttttttttttttttcatctctagtaataaacctaagaactcagtggagatatcattctgggatgaacttttagtgggttcagaagcagctttatgcctagcacacactaggcaccctagctgccagtgaattactttgtgtaatttatttaaaccaggattacacaaactttttttgtaaatgcagttctggcaaataatcctattttaaaagctccaaacggagaatttgctacataaagcaactccatggactaggctgtggagataggaggccagtgagataggagaagacacagggacaaatgacacaagccacatatcagcttgctgggaaccttgggtccagtgtaccagtcttggtccagacacagatagattacaggacacaccaagtgactggacacaagtattggtagaaggacagcatcacagacaaggaaacaagtcagtggggtttaaaccccactcacatgtggagtaggctggagagggcttccatgcagcaggaccagcaagtccaaagtgaccaatggggacaagtgtgatggggtcaaggggaggggaggcctaaaggcactgtggaagcctggatcccaagatggagggtacaaagagtgaggccaaggaatgccattcagtttggtttctatgattagatttctcctagaaagcagctccagaaacatatagctgatgctgcgcaccaagcacacgccaggtaagtgatggcaggcaggggcaggagcagcccagccacaaggacacaggcggccagggtgcagagccaagctgtcccaaaaggaagcagaccctataaattttccattaagtaatgacattctggaaatctctaagcaatgcccttgaggcaagatgaggccaaggacttctagaacttctgggctgggccatgcttgtctctttccaaaaagacttgcagcaaagccaagggacaaaaactcatgtgtgctctaggccagtgaccactcttcttcaccttctcaccaggcctagataggcccttgagccgaggaagctgaattttcctttttttttttttttggagacagggtctgtcgcccaggcagtgcagtggtgcaatcttggctcactgcaacctctgccttccagggtcaagtgattctcccacctcagcctccccagtagctaggattacaggcgtgtgccaccatggctggctaatatttgtatttttagtggagatggggtttcaccatgttggccaggctggtctcaaactcctgacctcaggtgatccacctgcctcggcctcccaaattgctggggttacaggcgtgagccaccatgcccggacagaagctgaattttctgttcacaagaggaaaaaaacagttttctacagaaaacctgactcttgaaccttgcctcatttggtgttttaagccattgcaaaagccaaaacacccctccctagccagccagctcacaagtgatgcacagtaacagttaaatcctcaaaaatgctaacattgcttctggcctcatccccactttacagatagggaaaccaaggcagagagaagtacctgacccaggagtggaaacaccaggtctaagcagatagagtggcccaaaacctggcatctgattcctgggcagttaagttggcctttgaattaaggaagtcctcattagtgagctgcacacacacacatcagaagtgtccaacacagatggtcgtgacacagtggccatccttaacacacacacacccaggcccctgaggaaagaaactgctggaggttgtctgttcaaatgtgaaggtatgacatgttcgacacataagacaaacctggtagctaccagtaccccaaagtttctttaaggaggctctgaagataaccaatgaaagtgacatctggccgggcacggtggctcacgtctgtaatcccagcacttcgggaggccaagaagggtgggtcacttgaggtcaggaattggagatgagcctggacaacatgatggaaccccatctctactaaaaagacaaaaaattagccgggcatggtggccagctactcgggaggccgaggccggagaactgccttgaacctgggaggcggaaactgcagtgagccatgattgtgccactgtactccagcctgggcaacaagagtaaaactccatctcaaaaaaagaaaaagaaaagaaaagaaagtgatatccatggccccacaagggagatcaccataagatacctgggactcctgcacccactctgggcctgtgcagcacctgcacctcaagggaccacactgacctactgctatgcccacagccttcccatgactacaggaaagtaagacccttgggaaacttcaagagcccactcttactgcaatgacaagaaacatgaggaaaaccaaccacttctagtctgttatggggcaagaaagagaggtacagtgagaagtcctatgtgagacccagatgacttttctaaggcccagatttgatatgaggtcagcctccttgggcgaattcttcccacagcggttccccccaaccccacactgccccaggcccctagcatctaggctctaacaacaagtcagccaaccctgtcaccttcagcctttgatctgctagccctactgccagacagatggatggatgcagacataggctcacagactctctctctctctctctctggcccatagcatctggtgcttccctcatctccatctactgagttccatggtcagccccctaggaacctgaaggcaggctcatctttatttcacttttatcttcccagcacacaggaggtgaacccttagtgaccatacccacattgtcatcctggggcttccagctcaatctcaaagctctggaaaagcaaaacagttcacactctcacatggataatgtggagaccaccagactcagtcactcgctcaggcaacaggtcctaacatgccttgccctaggactcagcggttgacatggcattctcccgagtgattaggcaatacatggggtgaatactgtggaggagaagggcagggctgctctggccatggacggggagagggatctgcactgacccgagggacaggcggcatctctgaagaagggacagagaatgagaccagaggcgggggaagagtgtgtgcgcttctgtggtgggggtcaggcaggcagtggcaagagaaggcatgcctggcatagataacaggagacaacatcttcaaagttttccgttgaaaagattaaaaactgctgctccctctccattttcatactgacctgtggccaaaaagcaggagccaccattcaccacgttaagagttagctgaaggtcaaggaaaaggaaaagaatttcgcttattgtttccaatccaaaggcggctacataatcgaacttgatgtcctacttttgtatctacttccaacagaaaccctatatcatgttcccagtgtagaagaaaaggatgaagcaaggttagacaatgctgtagttcccaaactgagtgcccaggtgccttggggatgtcatggtaaactcagatggcattgcaggaactatcagcacaaggcaattgatcatttcaacaccagattgcactatattcaacagtgtcacagcctgcaacacttgatcagcaagttgctgtaataaaacaaagattgtccaggcacagtggctcacgcctgtaatcccagcactttgggaggccatggcaggtggatcaccttaagtctggaatttgagaccagcctggccaacacagtgcaaccctatctctaccaaaaaaaaaaaaaaaaaaaaagtacccaggcatggtggtgtacacctgtggtcccagctactcaggaggctgaggcaggagaattacttaaacccaggaggtggaggttgcagtgagcagagatggcgccactatactccagcctgggcaacacagcaagactccgtctccaaaacaaaacaaaacaaaacaaaaagcaaaggtcatataaaaatcaacatgaacacctgtaatcccagcactttgggaggccgaggcaggcggatcacgaggtcaggagaccgagaccatcctggctaacacagtgaaaccccatctctactaaaaatacaaaaaattagccaggcatggcagcgggcgcctgtagtcccagctacttgggaggctgaggcaggagcatggtgtgaacctgggaggtggagcctgcagtgagccaagatagcacaactgcattccagcctgggagacagagcaagactccgtctcaaaaaaaaaaaaaaaaaaaaaaaaaaaaaaaaaaatcaaaatcaacatcaacaggagatgcaggtagtgacatccaacctggttctaaggtttgaggatttgtgcagcatccaacaggcagacacatcctattagaaagtaactatgggccaggcatggcgggccacacctgtaatcccagcactctgggaaaacgaggtaggcagatcacttgaggtcaggagttgcagaccagcctgccaatctggtgaaaccccatctctactaaaaatacagaaaaatcagccaggtatggtggcgcatgcttgtaatccagctactccagaggctgagacaggagaatcacttgaacccgggaggtggaggttgcagtgagcagagattgtgccactgtactccagcctgggcaacaaagcaagactctgcccaacccccgccaaaaaaaaaaaaaaaaaaaaagaaataactatggttatgtaagaataaaatatatattcctgtttttttttttcagacagctacacagttgttgagacattggtacttattctgctgcttgtgcttaaccacctaataaacaatattgttggctacttcctctggcctgaggcatcacagaaaaaactgagacgtttaaggatgttgtgaaccaagaaaatttgggaacttctgggttaatgaaaataaaaatgtaaattttccctctaaattcatagacctctgattaagcatgcctgttttcttttcttttttgagacggagttttgctcttgttgcccaggctggagtgcaatagcgtgatctcgactcactgtaacctccgcctcccaggttccagcaattctccggcctcagcctcctgagtagctggtattacaagcatgcgcctgcacgcctggctaattttgtatttttagtagagatggggtttctccatgttggtcaggctggtctcaaactcccaacatcagatgatccgcccacttcggccgcccaaagtgctgggattacaggcgtgagccaccgcacccggctaagcatgcctgttttcaaagatgttctttgcaatcataatatttaagtgaattttgggaaaatattagggatagacagtacttaacagagaacacaactgtaatgttttataactctgaacaggaaacaaactgtttccttggactaactttatttacaatctagtcaatagttcagacaaattagaaatctaacaaaagatatagaaaacaaaaaatccaaaaccagctcagaaagtttgaacactttctgcaatgatggagtccctacttgcaaagtggatggcagcaagccctcttcactggtatcctccatcaagtcatagttctctccatcgcccgtcccaattagctcctatccttcaaaggggctttcagggtctccagacaggctttgttctgaacccactcatcacaaagcagtctggccccaagcaacctgttcccagaccaggaaaggagattagaaagcaggatatagatagatacagacatgcagggcaggcttagttctgggactctaaaggcaagccagagaggaaaagagaaagaccacaaacaactgcccagaatctgctgattgctggagattcagttcccagttccgtccatcacaagtcactgagaaaaccaatgggttgggaccagctatactttgtatttgcagttctacctgaagtcctggcctcccagcggacctcttgaaacccagtaatcctgccttcattctgtctggtctgttcagactcacccctctcctaaagtgatggagcacacaggtagaaagacgccagggaaggcagaagcagtcgccaagacgatggctggttaaaccacacttagcagagctttatgcaagccatcatcacacagacctgcaccagggcctagaagagctccacaggaggtacctgccacttcttgagctgatgctgttatcgagcacttcatctgtattggcttagttatccacacaacaaccctaaaaagcaggctgcgactttatcatcttcatcatcatccccatggggacagaggcagagtggatggtggcctggttggctggacgtcatttggaacagtgtgtgcttcaagtcctctgctccacagctgtctccactcaccaagcacagtggcaacacccacaaggggcagaggcccagtcatcctacacgggtctttggcttggccagcagcaccacactttgctgtacccatcagtggcctgccttctctgcagaagcagctgggtgccatgtggcccataagctgggtcttaagtcagacttctagcagtagtattccaaagaatttcatcctcgtaaacaaatcagagccaagacctctccctgcagcacctggccatctgcttacaatgagatatatcccgtgtcataggtgaaatctaaaacataccactgtgctgaagtcatgaggtgtgggggcaaggggaagggacaccaagttgttatttatgcttcccaagcagtaagatgcctgaggggacatggcttaaatttgttttattccatacagactgccagccaatgccaactgactacagcccctcatgaaatcacaagttcacagtcacacatacccttcaggtagaggaggtcacctctccaccgctccaaggctcttgaataaacaattattttcagggaatgctagattctgcccagggacaaaaacaagaggatgagggaccctgactggtaaaaacctggtaatttctcaatacaattcaatttacagcaatttacatcttatcttgtcctagaaacatctttgctgaaatgctgattacacaacatcaatatcagaaggtctgttcccctcctaggtgctagagtggcatctacttcaaattcctgacagcggcttctttaattgtgcaatctgtgtcagtggggaagcacaaataggattacttttccatctgactggctcaggcagctggtgagaacagcgctcgtgtcatcagccagactgcgccgcctggagccgggccagtggccgtgcgccgaggcagctcttagaggccttaatcctccttcacgcagtgtgtatacaccctgccccccaccccttggaccagccaagtggtggggccccattacctcttgactctgcagtaccccagaccctgcaacttgccttggattagacaagccaaggcagagatatactggccttgctgctaggggagagtgtgagccacactcaagctctctgttccccactggaggggacacaggcacacaaggatcttgcagtcaggaggccaggaaactgggcgggacacaatctcaccaaccagaattccagtctctctgcttttgaaactcatcagcaggctaattaaactagtagcactgaaaatgctgcagcatcttttcactgcaaaagctgccagcaactggagggacaagtggctcaggtacagtgaaaggatccattgttacatgtgggttacatcatgttgctgattgttaaatctgggcggatggattcatgaaatgtaaaatgttcctgtgagaagcatgtagcaaaaacaaaactttgacatggacaagatcaaaactgttgggttggccaggcatggtggcttacgtctataatctcaacactttgggaggccgaggcgggtggattgcctgagttcaggagttcaagaccaccatgggcaacacagtgaaaccctatctctactaatatacaaaaaattagccaggcatggcggcgtgcacctgtagtcccagctactcaggaggctgaggcaggataattgcttgaacttgggaggcagaggttgcagtgagccgagattgtgccactgcactccagcctgggcaacagagcgagactccatctccaaaacaaacaaacaaacaaacaaacaaaaactgttgggttaaaatgtattccagcaggggcaggctaggctaacttttcctgtaaagggccagagagcaaatattgtcagctgtgcaggacaaacagcctgttaaaatattccattctgccatcatcataaaatgaaagcagccacaaataatcctgaaacaaatgagcctcactgtgtgccaaaaaaactgactggcctgcaggccatagtttgcagcccattccatagatttctagactttgtgaaggtaagagaatgtgatgttacatcagaaatgcaggatgcaaaattacagatgaaattaggtaacaatgccaggtgggtgggcacaaagacccacagaatgaagccagaggtggtggcaggtgtgtggatgacaacacctacttacactgaaaaccaaccaaccactcggccacacatgtaaaaactactcagcctctatgcaatctatcccctttgacaagcccatactggcctcttggtgtctgtccacttctacctggtaagttggcccttcaggcactacacctggccaaattacaggctgaaagattatgatagaaatgtcattaattcaagctatgcattcccactgactcagctgtgcccttcacagttaagagtggcattttctccttgttgactcctttaaagccatttccccatctcctttacctgtcttcactttacaccttttcagctattcatctttttcaacagagctgtggggtatgtggcactgagattcatccacaccataatatgaaacacagctggaagtgctgacacacacagtcccagctcttaggaggctcaggtgggagcattgcttgagctcagcaaggctacagcagttaagctatgatcatgtcactgcactccagcctaggcgacagagtaagactctgtctttaaaaataataataaattaaataattaaattatgaaacgcaatgtgacatgactgtgaatttatggattaaaaccctgctttgagagagactccaagatggccagggagcaatgcagatcacaaagtaggggctggcagtgagctgggcactttgctctgcttaagaggggtgtttcctaggaggaaggaaatacgggggacacacttggagaatgaaagactacaaagacagcaagagtgggagaggaagttcacttcttagagggcacgaagaattaaaatgagaagaaagtttaagagtgaaagacaggtttagttaaactcagctgataatacactcctgggctgcccctggtgtcaatcagaaaatttctccggatgacatcacaccggtcttctgaaattttcccattgcaaacaaaagcataaaaactaagcttataatcctcatttaaatttaaaactataaaaatttcctatataccaaacaccagggaaacatgttatgacagcttctatgtgagtggtcaagatcacgccctttgggaatttgggaagccaagagagagatgagtgaaatgcaaacaacaatctgcatggttcatgaccacaatgcctgtggctgaaatgttccaaaacacaccagcttaacacacagtcctgttatgtgtaagtggaaacaacactgaactcttgaaacagatccacgagtgggaatggtgacattccaatcaactgctctaatttcacccactgggaagccgcccgggtgagtaagcaagagtgtatcacgcctcttaagtttcttctcaaagcagcagagcagcggctgactcaaggtgtccctggaacctgcccacactcactggggacacaaaagggaacagggctggcacaagtgctttcagagacaccatgacccaacacccccaccagcaacattttagccatgactagcaagagcccttgctgggtgggaaagccaaactagacctttgatgggcacgaggagagatggagccaggaacagacacatgcatgaaaggcaatagcacacaatgactcagggtccagaggtatcaaagcctgggtatctcgatgaagagctgacgttaatgggatgatcttttcttcaatgatattaccctgggcacttcattgtgattttaagagaaagatctggaaaaaacgttacacctgtcagtatctagacacgctcaagaaatggcttcagacaagaagacttttcttctcatcttgccctcaccactcattaggtacagaatccaatctatggggatcaggaggaggaacggcatcacttttcttgaagaaaagggaacgcagaatgtgacactaaattaacgtcagagcttccagcttccaaagaccccaagtccctggctgacaaagcaggaactgaagactgacccaagacccaaagatgaccagtcagtgagagctgacagtgtctcaagtgctggatttatatctgatacacacccccaagggtacacaaaaggccattcttacaactttacagaagcctttgatggtcaatgccgtcctaggtaaacaggccaaggggtccccaccttccaggcaacattaacttcactttcaagcttctcttccctcaggtaaaagcaagccacccagataacccattccatgcactgctgggaggccctccacacacattcagtgtctacttctgtccagacaactgaactgaatctgctggagagggatgcttggaagtaaatagctgtcaccctctcatctcagtaactttcagaatataaaggagcagaataaaatgaaacccacaccacttcagacgactacagctaaggaagcaaaaaacttggcaggcataatcactttgtgagaaccatgttcttgtttgcccctaattccacctaacttccacaaagtaaataacccacagaagtcaagcagcccaactcttacactgacaggcgagtacatggaggtgctggagagaaaagacacagagcatgcctcatctcctcactgtgcacacccttcctcctctctccagcccctgcaggcagcagccactcacagagcagccctgggtgctgtgccacaagggagccttggatgcagccaagttggcatcttgcagactcaagagtccatcacacaacctaagttcactcccctgcagatgtggccagcttgtcctctgagtccactgaggagtaacagccacttaactggtaaggaattttcagaccaatagaaaccaaaacccagggcagcgactatcacactcgtatggaacctgtggcagtccctaggaacgcctcaccacctttctactaaaaatctgattaagttcaggagttcaggcccagcctgggcaacatggcaaaaccgtgtctctaccaaaaatacaaaagattagccaggcttggtggtgcacgcctgtggtcccagctactctgcccagctccagctacttgggaggccaaggagggaggatcgcttgagcctgggagacagaggttgctgtgagccgaaatcacaccactgcactccaacttgggtgacagagtgagaccccatctcaaaaaaagaaaaaaaaatctaaggatgtagaaataaggtgcatcacacataaataaagccttagactagggtctagcatacagaatgaaaaaattttaaaaagtgcacatccctgagtagaaaagagatggcaagataacataaaactttggctaatttttattactactttttacatttgtttttcccaactccctgaaataccatcaacatagttatcaatcaggaactaaagggaaaaaatactttaaggaggacttaaatggccaggggtgggtgggggcacgaagcacagcaggagagacacctggcttagttaggatggtgcccactctgagtttagtaactgctttaggaggcgtgtgtgaggagagccagagagcaacatgctggcagcatgagacccactggccttccctagctccctaagttattcccaggttctcccagatgccatgctaggcttgcctcgtccagggagggagccacctcaaggaggtgccccattaccctctcctaagtcccaataccctcccaccaattcttcccacgcctctgtcctatggacctaaggccaaaagccagacaaagggggacaaaggtctttcctcaggtatccagtaacacaaatcagtccagtcccctccaccccgagcagatgagaaaaggagcatagcccctcccctgcaccggcctaacatggaggagccaacacagtgctgcagcaagaccataatcaggcaccgtggtactcacaggctggaggccttattagcacagaagacgagaaagagacttcagcagcagagacagggaagtaatagggacatcaggtggagggcatgggagaggaaggtggctgctgcacggaggaagtgaaactccatacttgcacatctgcgcatgtccaacagaaatacaatgtggctactcatgccattttaaaatttctaggagccacattaacagagaaagcaggtatgcttacccaaaataccatttcgacatataaacgtgtaacatttttttccttactaaatctgtgaaatctaagtgtgcatgccccacagtcacagcacaattcaggtgctaaattttcacccaaaatatgtgatctgtatttagattccataaaacttgcagctgaaaaagtagattcacatacccgaggtgtccccaacatatctggatgtttttcactaactaaactgagcatcagctttgaaaattaattagaatttgattaaagtaaaaattcatttcctcggtagcactagccacattttttgatgctcaagagccacgtggggttagtgctgacctcactgtgaaaatctaagaggtttcactggctaggaggccaagggcaggcattttaggaactctgctctggggccacagggatggggaatactacacattcaggctggttagaccccagtcagtttccacacctaccacttttatcacccacagatccacctgtgctttaaatcaacctgctcaactaaaatatatctatttaaaagaaaacattaacatagcattagtattaacacatcacctgtgtgaatgggggaaacatatgggaaatctcaacacaggatacaatcattgttgagtttcctgtatgcaaaaaaatgtttatgcggttttagaggacagtgcctttattctttttttttttaagacacagtaaaaactttaataatcttatttttattatggtaaaatatatgtaacataaaacttaccactttaaccattttttactgtatagtttggtgacattaagtgcattcacgctactatgcaatcactatctagctccagaactttttaatttatgtatttattttctttaaagatggggtcttgctatgttgctcaggctggtctcaaactcctgggctcaagcaatattcctgcctcagtctcccaaagtgctgggactacagatgagccaccacaactgggcgtttcagaacgctttcaccttgtaaaacaaactctgtaacccatatatccactaaacactaactcccaatccctgcctctggcaaccaccattctactttctgtctctgtggaagtgactcctataggtacccagcgtgagtgaaaccacaaagtatttgtctttttgtggttgtcgtatttcacttggcataacgtcttctaggttcatccacattgtagcacctctgaatttcttttttttttttgagacagtctccctttgtcgcccaagctggagtgcagtggtacgatctaggctcattgcaacctccacctcctgggttcggcgattcttgtgcctcagcctcccgagtagctgggactacagacacgtgccaccacgtctggctaatttctgtatttttagtagggactgggtttcaccaacttggtcaggctgatctcaaactcctgacttagatgatctgcccacctcggcctcccaaagtgctgggattacaggtgtgagccactgtacctggcctgaatttcattccttcttaaggctgattaatacttcatattttgcctatctatccatccatcaatggacacaggttgcttctataataccttttggctactgtgtatagggctgctatgaacatgggcgtacaaatacatgtttcagtccctgctttcaaagagaatgcccttaagaaatgtttgctgaagtacacagaggtaatatcacatctgcaacttattaaaaggatttatgggtggctgggaaggatcgcttgaagccaggagtttcaggctgcagtgagctatgatctgccctccagactggtgacagagcaagaccacatctcaaaaaataataaataaaaataaatagaagaagaggagtgaaacacaggatccagttataaacttggacaatcacccatcaaaaatcagctccttcccagaagatgtttataaggcacaggcagaattcatccggaactgcagacactgccctaagcccatccacaccctccgctggcttctcctgctggtgtgcagagcacagaacagcttcacagtcttcccttgtttttaccaaagcagccgagcagctggtgctacacaggctggtgcactgcccagcagacacacagggccgccgaagggaggaagtcaacgcccgagggtggccactaagccgtggcgggtgcctgcccctgcagatggaggagggctgagttctaagcacactactctgtgaatggcatgaatgagctctttcactggcaccagagagaacacgcaacagtaccatctgctgaggggagggaaagttcagaggagcaggcaccgactcctcaggcttccacagccaccaggtccccactgtgtcaaggcggctgttaatactcaagtcccctcctccactcctgaacatgagagttaaacaaagtcagctacagtctcttggtccataacaacctagggaaagcaaactacagaaccacgttagaaatgcttcacgtcttttacctcaaaatacctttgtttagtaaccccactccccgacacaggccccatagctctgttttctgggttctgacaactagtgccctaagccagaggccaggccctaaagagacaacctaggcaggcttgagatgtttctcccacgacctttccaaatgattccagcagaaagccagactccttagctacttaaaatcagaaaacagctgggtgcggtggctcacgcctataatcccagcactttgggaggccgaggcgggtggatcacctgaggtcaggagttcgggaccaacctgaccaacatggagaaaccccgtctctactaaaaatataaaattggccgggcatggtggcacatgtctgtaatcccagctactcaggaggctgaggcatgagaatcacttgaaccctggaggcggaggttgcgatgagccgagatcgcgccactgcactccagcctgggcaacaagagcgaaactccatcttaaaataaataaataaataaataaaataaatcagaaaatagatgggtattacttcccactcaaaaccactctcaaggtagctaggttagtgcaaaagtaattgcggttttgatccaaaaaaaaaaagaaaaaaaaaagccaaaacagcagttacttttgcaccatcctaatagatctgatgaaaccaggagaatggaagctaggaaagatgtggctcacaagcaatgggagaagtgtgcttgtaaggacactggagccccccagcctctgggttctgcccacggggcaccacccacagccaggtccctgcctgcatagacaggaaggaaaacggggccacttcacagggtgctacagggctctcagcaaggggctcaagtgagggaaggctttccaacgaagcagcctgaagggcaaggagtaattcacatttttgttttagttcttggagaggtttggtttcaaggcaggatagacacattaaaaaccatatgactgccttaggcttaagggtagggcagggggtcacacgctaggcatatgaagccctaatgacaggtgtgtgtacttctgaaacccagaaaatgaaatccctaaggacttcactgaggatccattggagattaaaaagaagctcccatcgaggcctcctcctgctcgagtgacatttaacaccaagagtaagctgactgacatgtggattattaaaagtgtattcaaagtcaatgttaaaaagttagtactagaccatttcaattctcttcaagacgcagcactgacttagaatggaatttttgatgcgcctccactaatcctgttacgttagaaaacagaaatagaatttgttcccttggcgttcactggttgccatagaaatcaaaatgcattatactttcaggtgaagaaatgcatcacgagtactgaaaaagaaaaactctcatcaaatccagtacaaactcaaaccacccctttaataataaatgggtgcaagtatacacctagaacaccacccaaacagatgtgttccagccctggggaagcaatttcattcatttcaacatacagaacaccaacccctagaaagatgctctaggcaaacagctaatctggccaggctgggactctgcctcagatggtaaagctcacaacatatacacccgcttctcatctaagcctgcagttttcatgtttccagtgtgttccatctcatacccatatgtacgaaaacctaagtgtaccccctcttccctcataaacacaggctccctcatgagttggttttgctatctctaggggatgatatacaggctattataaatttgatttcaacccaaggaaacatttgagaggttttaaaaagcgttcttcataaatgaaaaagaaaagaaaaaactctattgcattaaagacgcatatggtattttttttactggtcccagatggaaagaagtgggtatgatggcacttcagaccctgcaaaacccccaagtcaatgggttatggtaactgtgacctgaccattgcttatcacccaccaccaccaccccgatcctgttcctaacatgtgtctactgggcctgctcctgacttgttatgccctgctcctggagtaggcctataaggagatggtgttaaggtgaagaacagactgcaaatcagctcctagttgaggctagccaaacagcaggtgcctggggatgactcagtatccccatcatttgaaattttcctggtttaggtgaaaatactgggagttctgactcatcctactacatctcttgggagactgtgggctcaggagattcaacacaaagacatctgcccttgtgggttcacaggaacagatagacaatcaagaatgaaaataacaactaaaattaggagatggtaaaccctatggaaaaaagaaatgtaggtggcagatgggatggcactttaaaaattcctactccttatgactttcacaagtgaggctctgtggttcctaatctcttctcattgcctccgtattatgcactgaacaggataacagtccacccagagaatacacattctccactggaacatctcatttatgtgcaaattgctctaaagctggttcccctgatatataactattttgaacacaggggcttgtggcttacttaaaaccacagcttccatttggtgatagcatctttatactatcatctttaaagataatgaaaaacgactgaatatgcctttgagaattaatgtacatatgtaaaagagcagctcattaagcaatcccatacgacttcagtggtttgcatgctgtactactttgcctagacattgattttaagaagcttatgtatatcttcctgagtcaaacgaaggttcagtcatccttgactctacccttcaggcaggttatgatgtcagcaatccttaggtttacattcttacagccaaaaggatggtaattccttccactataccagttattttgctacgtagtgacaaaatgattccctaaataaactgtaagcagtgctgaatgatagccactcagctaatcaaagccacatttttcattttacaaatatgttccacctttaattgggaaagcaagccaaaaggagaccccctagttatcacaacatcccaccatacttaatgatcccaccctggtgttctctgtatcctggaattctcagaagttatacaactctcataggccaaaaacaaaagagcttcatttcacagccatctggaggtgccttcatgacactcaattacggctgcagactcagatgacttatctacaccccaaagggtctgcctctgctgctggaaatgctagacccagaagcccttggcactaatttggaccacacaatggactacggggaaaactacctgcctaatagggcatcgtgagcaaatgagaaaacaactgtagatgtttcgttgaaaagcctgggccgggcgcagtggctcacgcctgtaatcccaacactctgggaggccgaggcgggcggatcacgaggtcaggagatcgagaccatcttggctaacatggtgaaaccccgtctgtactaaaaatacaaaaaattagctgggcgtggtggcgggcacctgtagtcccagctactgaggaggctgaggcaggagaatggtataaacctgggaggcggagcttgcagtgagctgagatggtgccactgcactccagcctaggtgacagatcaagactccgtctcaaaaaaaaaaaaaaaaaaaaaaaaaaaaaaaaaaaaaagaaagaaagaaagaaaagaaaagcctgaaacatccccaaaccaaaagtctagttttaggtctcacaatttcggatgtgaaaggattgcagcaacagaaggagggtaactctgctcacactgctggtagttaatgtcctactctcttaactcctcttggagttaagtgcccctgaaagggtgcttcctgccagaccacaccaagtgcacacctgggtgtctccacaacagccgactactgtcgatgctaaaagttcaaggaggccaatggcagcaccactcaaaacagtgacatccaggctgaaagaaaaaaataaataaataagctcatctttaactcagaaaaagattagctgaacctcaggtgccaatataaaaaccgaagctaaaaaacaagcctgaaaccatacagtttcgcttgttaaagacactagagtggttgttttaagggctcctggctacctgagcccaaaccagaagtcctaggagggtggcactgggtagacccagcagggtggcaccgggtaaggccactggcaggcttatctcagttcccaggacaccagatcataagcagaccattaaaaggagagtagcagttaaaggtacaagacaggaagcaacagctggcaactcgatagcaggaaagcagacagctatgtcctcttgccaaaagaaaaatcagccaaaaatttaaccgccatggcagagtgtaagagctttagccgactcgtgcaggcaccactcgttagtctctagtggatatgactgatagtaaggtgtccccaagctagcgacccggaaggggtaaagcacacctatattttaaatgtttattgtaaaatacacagaacctaaaatccgccattttaaccatttttaggtgtacaattcagtggctttaagtacatttacactgttgtgctaccatcatcattatcctcctctggaacttttgcatcattccaaaaagaaactctacccactcaacagtaactccttaatcctcctgctcgtggtaaccactattttttgtgtatgtatttgaccatttttggtatctcatgtaagttgaatcacaatatttgcccttttgtgtctgacttctttctcttagcataatgtcttaagattcatccaagttgtagcatgtgatattgtgaaatacatatttggtcttcaccgtttcctggcatacgattccctggaatccccaaaacgctaagtgtctttttgtaggctaatgagtagactgagggctgggggctcctggatagcacaatcaggaacaattaagaaatggagcaccatgctaggacataccatgagtctgagttttcgcaaatgtaatgattttctcatactctgaaactaaacatttctgtgttgagcaaaacataaacgccaaggcgaaatgttcttgttcccttgcatttctgcagctgtaactgataaaggtctggacgtgcagttcacagcagaggagagagactgtggctgctctggacacatctggacgacaggcacccagccctcaagatgctgtctgccagctaggtggaaacacctcatgtgaatgggcccatttgcttcctctccactccaaaaggggatgagaagaggaatgttggtatgtgatttttgcagcaagcactgaactcaagcgaagcttggttatcttgccacctggaaggttaggtgtgggaggatgacactaaaagaactggcccagaaatccagggctaattttgttcccctttcccactgtttttgcagaaatctcaatataccacaggcagccaacagctcaggagaggatcgtgctccaaatgttcatcgagccaatcattgggacttctctgccaggttcccagggaagaatgttgtaaatgatggctgggtgccatggctaatccaaaatgaacagaatcgctatctcctcagagcctgggtccctagggcctggccaacatccaaggtgcctgggacacagacagccagtgaggggcatctggagccctgtgcagtgaagtagcaggcagtcaaggatattgaaaggtgtgcaggctgtcccagaccccacgcccagaaggccattcagagaccaaagaacatgactaactccaaaatgaagataaaaactacagttcagctatgaatgttttccgtctaaacactcaacaccatactactactttgtgctgtttacaatttcctagcctgctattaaataaaaggttccataaaagggggcaacagcccagaaaacaaaccatattgttgaagttgaacctctgcccatcccagaaaaccagcttgctggagaaacctgtgccatgtcccactgcagcctgggggtgccacggtgtgtgtctggtgtctatgcatactgtatccctagcacctcatggcactgggcatctaacaagagcccagggactagagacaggttcccgcatctctctcacggatgcacttgctgttgctagctcatgtggcctcctgaccctcgatttcttctatcaatacactaggctttctctgccgggaataccttgttctccaagacactccatctggctaaaatctttccttcaaaaggctttccgtgtgtcctccatttttgctaatttcaagcctgccttgggtggctttcccaactgttgctgtggccagaatttgccttatcacaatcacagggtatctacttaatgctgagaaactagatgctttccccctgcatctggaacaagacaagcatattcttactactctttttcaatcatacttcaagtccgaactaatgtaataagacaagaaaaggaaatgagagaggcacagattgggaaggaagaaataaaactgcctttgtgggggctgcgtgcggtggctcacgcctgtaatcgcagcactttgggaggccgaggcaggtggatcacctgaggtcaggagttcaagaccagcctggccaacatagtgaaactctgtctctactaaaaatacaaaaattagccaggcatagtggcacacgcctgtaatcccagctattcggaagactgaggcaggagaactgcttgaacccggcaagtggaggttgcagtgagctgagattgtgccactgcactccagcctgggcaacaaaggcgaaactcagtctccaaaaaaaactgtctttgttcacagatatgattgtttaggtaaagaattccggccaggcacatcacaaggccaggagatcaagaccatcctggccaacatggtgatatcccgtctctactaaaaatacaaaaattagctgggggtggtggcgcacgcctgtagtcccagctactcaggaggctgaggcaggagaatcgcttgaacccgggagagagaggttgcagtgagccaagatcgtgccactgcactccagcccggcgacagagcgagactccatctcaaaataaaaaaaaaaagaatcccgaagactcctggataagaagcaaggctgcgagatacacaaacatcaactgcttctttatataccagtaatgcacaattacaagcaaccacagcatctaccacactgtaatgctgtggccgcatttgttccccttcttccaagtgcatattggcatggatagtatctagtgagtgcttcgcaggttgacaggcctcaatgtgtgtttgaagaaagccagagattagccacgatggtcagccacacaaggcccaaagcctgaggcagaggctagcacatgatgtccgcagaccagccagtgtgtctttagagagcagtggcgcggagagtaaactatggccgctgaagtggacagggagccaaaaggatctggatgtgaggcagcatcccaaagtgcagtctcctgaccgtccagccacactgagattctgaagcaccactccgtccagcggcagagctttaagttggaaaatccaggggcataaagggagacaaatcaacttactctaaatcctctgaaaattcccttaacaaaggagttgtgttgacagagacttctctaatctgaagagcaactgtttctccctggttctctaggcatataaccctttctgcccacctctcatggagagtaggctctgacggcagaagccccccccaccaacagccaccacatgaaacaaacagatacttcaaagccagaagatctttgttcagatcctgcccctgggcaggcacctcagccccaggtccatcttctaggtggatttcgtaacatctaccttgtatctgtgaggagtaaacaaaagatacataaaagcagccagcatagcttctaacagatagacgtttaaaagttccttcccctttgacacacaaagtcacaggatgtgatacagcagtagccctcagttacattagccctcagctacattcttaacaaaagacacaacatagcatggcagccaggcctggcatggtctccagttgtgccctcccgttgaccaggctgcacagactgcagagccttccaagctgctccttctgcagtcctaaatctacttgagagccgctgctaagaaaacatcagatggactatactgctgctccctaccttcctgaataaacaacgtacacacgatacagagaagcactgagccactgccaccgaacccccccaaaccctggcttcacagagttttaaaatcgccttggggtactgcggttgcttttcaagtcttttacccatcaaagcctgacgcacttccacacattcctttgtagtgtttactggacaagtgcaaagaactaagatacgctctgtatttacagagctaatgggcctctttcacagcaagttgacatctcatctgcttttggacatgcctttgctcagggatcaggtttagtgggagatgccccacctgctggcaaatggaatacagctgtggactctaaccaggcgtcctcacttcctctgtatgaagccagccttcgtcacagcagatgatgtaagaggcagaaaccagctggaaaattgcaggtgaaatggtaatggcagcatataaggaccatgcccaggaaacccaagggaccaggtgcagcacggtgaaagagtgctgcctacatgtgtgcccatccacaacctcaagcatttctgcaatcctgcctgcaagatgaaagaaaaggaagcattacaggagattctattacaaccagtggaatctgcagttgggagagccactatgaggcacaagatgatggcctgcctcacaagggttacagcagcacccaacaatcctgagaaaagatccctctgtgcctgcctctgcaggcccaatgactcatagccaaatttggactttattataagcaacagtttattaaggtgggctctgcaaaaggcacaaacacgggtggaggtccacaaacaaaaacacttagcgtaagcactgatggaatatttggcctgtttttgccttgaatcttagctaagtatgtacaggactgtagttaactcaacggctttcaagaaaaatgcaaaatgctttctttgcattcttaatataaaagcttgtggttggccgggcacggtggctcacgcctgtaatcccagcactttgggaggctgaggcgggcagatcacgagctcaggagatcaagaccagcctgcccagtatctattaaaaatacaaaaattagcccggcacggtggcaggcgcctgtagtcccagctattcaggaggctgaagcagaagaatcacttgaacccggggggcagcggttgcagtgagcagagattgcatcactgcactccagcctgggcaacagggcgagactccaactcaaaaaaaaaaaaaaaaaaaaaaaaaaaaaaaaaaaaaaaagcttgtggtcacatcccttctctcctcaccccaccctgaaaaagagatgaaagaaattctatacagcttccctaacactttgaactaagccaaaattataacaatctacttcccacaaccagaaaatcagcttaacagaaagaatgcccaatcattcaaatatcaatccgactccgcctaagacccaaagaaagaaaacaggtctcacactaagacatccccaagcagcccaggataatttcctaggattctggcatttgggtaactgctggcacatcgtgtcacctttacaggtcacaccccaggtgtagcaacaaccctcttctgccggcacagagcccttccccagtcatggtggcaccacaaacacttgcagtaagtgggcacatggggagcaaacatgctcagctatcatggctgcccaccggggtggctaggtatcccccattttgtagaaataggcagtgtcttccatctgggaaagaagaggggctcttgtcagtcctgtctattcctgatccacgtgtctgtcttaagggagaaggccccatcactctatgagaagtgaccatcacatagagaatgaacagaatgacccctgccattttaaaaagaattccccaagactaatggttgctggagagttctgtaactttcacagaaactcacacaattcctttctcatgatatatgtgctcatatacccatcaaagtcttttacccatcaaagcctgacacacttccacacattccgcacacagattgctatgctatgcccacagcaaagtaatcaactcaagagtcccttggtggtggtggtgggtagggggtgaatgaagaagacaggtaaggcctgggacatccccgccatggccaagcccagctaagaagctggtcgacacaattttcgattttgtgatccccagcttcaagcataactctcaatatggacacatgtagagacacacacagaacagggacacatttacagggacatgtttccatggttccttcagtggcccagcatgagtggattccttggtatgacgttctgtttccttttccctaaggcaagtctgcattaaccagctggcttcactcaggagagtggggctcaacattccagtgctatgtgtccttacggcaagtggccacccacttctgcacttcacccacccaggcctgttaaggttcacgaggaaaacacgacttaattgctgctccacagaactgctgttctacagagagcgtatgaagagctgcctctccatctacaaagagaatcccttggagtttgcacctggccaggcacagtgattcatgcctgcaatcccagcactttgggaggctgaggtgagaggatcacttgagcccaggagctggagaccaactggacaacatagtgaaactccacctctactaaaaaattttaaaattagctgagtgtggtggtgtgtgcctgtagttccagctactctggtggctgaggagggaggaccgcttgaacccgggaggcagaggctgcagtgagacgtcacagccactgcaactgctgcctgggcgacagagcaagaccctgatccgataaataaataaaaacaaataaaaacctatgtgtcggctgggtgtggtggctcacccctgtaatcccagcactttagcaggccaatcacttgaggtcaggagttcaagaccagcctggccaacatggtgaaaccctgtctccactaaaaaaaaaaatacaaaaagccaggtgtggcggtgggtgcctgtaatcccagctacttgggaggctgaggtggaagaatcactttaatctgggaagcagaggttgcagtgagcagagatcgtgccactgcactccagcctgggtgatagtgggagactccatcttaacaaaaacaaaaacaaaaaatcaaacaaaaccatgtgtggggtagggcaatcacccgtaagacaaaataaaaagataaatatataccaaaaaaaaaaagaaagaaaatgcacctgggaagatgctccccgtcactagtcatgaagaaatacaaatcacagccacactgataccactgcaagactatgtgaatccactgcttcccacccctaaaaccctgacaataccaagtgctagtgaagatgagcaacgactaaaactctcatccactgctgatgagggcgaaaaatgatgcaaccctccagaaacatctgagagtttcctgtaaagctaaacatgtatttattccaatgacccagccatctcacttgcaggtctttaaccaaaagaaagaaaaacatgttcacacaaagaactgcatgtgaatagctttagcagcttcattaagaatcaccaaaaactagaaaccatccacgtgtccttcaactgagaaatgcagaaaaagctggggtctatccatatgatgaaacactactcagcaatgaaaagaaacaactgaaacactcccactaagtagtcagatgactctaataaactatgttaacgaaaagaagcctgactcaacctctacctcccctgcattgtatgatgccattttccatttaatatgacattctagaaaaagcaaaatcatagacacagaaaacagatcaatcgttgctgaggagccggacacggtggctcacgcctgtaatcccagcactttgggaggccaaggcgggcaaatcacgacgtcaggagttcaagaccagcctgaccaacatggtgaaaccccgcctctactaaaaatacaaaaattagtcgggcatggtggtgcgcacctgtaatcccaggtactcaggaggctgaagcaggagaatcacttgaacccgagaggcagaggttgcagtgagccgagatcgcaccacactgcactccagcctgggcgacagagcaagactacgtctcaaaacaaaaaaaaaaaaggctgggtgcagtgactcacgcctgtaatcccagcactttgggaagccgaggtggacagatcacgaggtcaggagatcgagaccatcctggctaacacagtgaaacctcatctctactaaaaatacaaaaaattggccaggcatggtggtgggcgcctgtagtcccagctactcaggaggctgaggcaggagaatggtgtgaacctgggaggcagaggttgcagtaagccgaagactgtgccactgcactccagcctgggcgacagagcgagactccgtctcaaagaaaaaaaaaaaaaaaaaaaaaaaagttgctgagtctcacgcctatggtcccagcacattaggaggatgaggcaggagtatcatttgaggtcaggagtttgagaccagcctggccaacatggtaaaactccatctgcactaaaaatacaaaaatcagctggacatggtggcgcaggcctgtaattccagctacttgagaggttgagactccagaattgcttgaacccagcaggcagaggttgcagtgagccaagattacgccactgccctccagtctgggagacagagtgggacttcatctcaaaaaaaaaaaaggggaattttattgcatataaacttaagagaataaacaaaccacatgcagtacaccaccctgaccccctttagacctggtacagagaccccccaggactgggagatgctgctttgcagggaaggcagacagacctgcaagtgcagcaggcaaggacagcctggtctgaaccacgagcttccatgctaacctgggggactctgagtaacagatgttctcagccttgtgtttcctgtctgtaaaacagagcagttcggccacgcacggtggctcacgaggtcaacagatcaaggccagcctggccaacatggcaaaaccctgtctctactaaaaatgcaaaaattagccaggcatcgtggcacatgcctgtaattccagcaactcaggaggctgaggcaggagaattgcttgagcccaggaggcggaagttgcagtgagctgagatcgtgccactgcactccagcctggacaactgagcaagactccgactcaaaaaaaaaaaaaaaaaaaaaaaaaaggattaaaaaattaaaaagtgcttttctgggccgggcgcagtggttcacgcctgtaatctcagcactttgggaggccgaggcgggcgcatcacgaggttaggagatcgagaccatcctggctaaaacagtgaaaccccgtctctactaaaaaatacaaaaaaaattagccaggcgtggtggcggtcacctgtagtcccagctacttgagaggccgaggcaggagaatggcgtgaacccgggaggcggagcttgcagtgagccgagatcgcgccactgcactccagcctgggccacagagcgagactccgtcgcaaaaaaaaaaaaaaaaaaagtgcttttctgaaaggagggctctagttaaggtaaaccatggttctgtgacttgtgctttacactgagagaacaaagcagcaagaccaacaatcttaaaggagtaatacacagtccatgtagggtacactacccctgcattcacatcaactggagaagagaagctatttccagctcaaagtaggggaaagttaatacatagctattcaagagtgtttatgtacagacagttaatcttgagaaatccaaattgtgtggctagaacaaagctactgtttacaatatttttcatactaatgcttcctggaggaccttccttggccccatgtttaaattttgattaaatgtcaaactagtaaaactatttgcctatgcggggatggggcggggggagaagacggttaggcaacacagtgccaaattcaaaactccgtactagctctgacagcgaacacctttagattcagaggagaaaagtagccttaaacaggacaattcagcctatctactgagatcatcttatcaaaaggagtaactgtcattacaataaaatgcaatacaacaatacaataaaatgcaacaaagccacgaagaaggaaaaaggctgcccagcattctagcacctatttgcacaattagcccacagagttacttacaaacaatattccccttatatagtctgtgttctgtttttgatggggcactgaatacagaacctatctgccaactttaactgtaatgcgataaccagagctcacacaaccacttctcgactgtttctgtcaggatgtttccagttttttaagtatcaacattacagggttgagaaggaccaacaagcatttgatggctaatgatgacaaagtccttgatcaagatgccagcaagaacattcaccacaacagactccatgcagaatgcttggagtgatgccctctgagccccaaagcacttgctctcacatttgaccaccaaggtaggatgaaagagctcagggtacaaagaaatatccactcatccgtcacagtgaaggattaccttcattatgtcctctccagaggtaaacccaaagtccctctgatcgctaacttttttacacttaccacataatcccaacccactctattcttccgcaagtcattcagagaaggcatacggtggtgacataaatgctgacgactaccaggtcccccggatctccagccgtctgtttgtttgcccacaggaacacacagtgtgtgctggcaataactaaacaagcttttctgcccaaggaggctgagctcactcagtgcctcgaggctccccaccatagttacaagtgctggcctaaccaagctgtgcctggaatcagccttgtcactgtgccgggggagtaggaaacagttaaaacacatttttatgctttcatttctataataaatgcatcagatatcacatgaaatcagctctaggactgactgagcacctgcctgctatacattttccaggccgccagtgccctgccaggggatgtgctgagcagccaaacccagcctggccatgatgcttgtagtaagctggcagacaatgtacgagcaacaactttcccagttaagcgccaactttccctgagtgtccacatgcttagggaagaaggttggacttaaaccaacaagcaattactgaatgcttactgagacatggggctcaatgtgtctgtatgctgtattccgacctcacaagaacctcgcacagggcagggattagggtctcagttttgcagccaaggaagctgatgcgagaagaaatcggtaattcatctaaggtcacacctgactcctcaccttatacccccaaaaaatcatttcctgatggatcaagggcatgaattggaagggcaaaaccttacaacttccagaagaaaatataaaatatatttcacttcaggatagtgttcttcccaccaaccgtaaaacaaagattcataaattcacctacattaaaattaagaccatcttttttttttttttttttttgagacggagttgttgcccaggctggagtgcaatggcgcgatctcagcacaccacaacctccacctcctgggttcaagcgattctcccgcctcagcctcccgagtagctgggatttctcccacctcagcctcccaagtagccaggcaggagccaccacgcctggctaattttgtatttttagtagggacagggtttctccatgttagtcaggctggtctcaaactcctgacctcaggtgatccacctgccttggctacccaagtgctgggattacaggcatgagccacagcacccagcctgaaatgttatttcttaataataagacttgaaaggtgaaactgatccatgggctgctgtatggatgttttagcaggcacgaaaacattcacctccttgtgcatgtccatcagaggtcttgggtgacaaggtgcatcaccaatgagttgtaatattttgaaaaatattttttctaagcagtaggtctcaacagcgggcttaaaatattctgcaaatgatgctgtaaacagatgtgctgtcacccagactttgtttttccctttacagagcacaggcagagtagatttagcataatttagatttaccataattcttaaggtccttggatattcagaatggctaatgagcagtagcttcaacttaaagtcatcagctacagtagcccctaatgagaggcagcctgtcctttgaagccaagtattgatttttctacagctataaaagcctagatggcattttcttccaataaactattttgtctacactaaaatgtttactgtagccacctttatcaattatcttagctagatctggataacttgctacagtttttccatcagcacttgctgcttcaccttgcacttttatgttttggagatggcttctttccttaaacctcatgaaccaacctctgctggcttcaaacttttcttctgcagctttctcacctctttcagcctccaaagaattgaatagagttactacggccttgctagattaggctttggcttaagggaatattgcagctgacctgatctatccagaccactacaactttctccatgtcagcaataaggttgtttcactttcttatcactcaggcattcactggagtcacacttttaatttccttcgagaactcctttgcattcacaatctggctaactctctggcttaagcagcctagcttttggctttcaaaatatgttattggccttttagcgttgttaaagggtattgctctgtcatccaggctggagtgcagtggcatgatcacagctcgctgcagcctcaacctcctaggctcaagcaatcctcccatctcagcctcccaagtagctgggaccacaggcgtgtgccaccatgcctggctactttttccattttttttatgaagacgaggcctcactatgttgcccaggctggtctcaaactcttgtcctcaagcgatcctcccacctacgcctgccaaaaaatgctaggattacaggcatgaaccccacgcctggccatttttagcttctgacttggtgtgagagacgcgagacccttcctttcatctgaacactttaaaggctattatagggttattaaccggcctaattttaagacagttgtgtctcaaggaatagagaggtctgaggagaggaaaagagatgggaaatagtcagtagctggagcagtcagaacacaaacatttatagactgaattcaccttcttagatggacatggtttgtggttccccaaaactatgataatgacacccaaaatcactgatcacgaatcataacagatataatagtctgaaacgttggtcacattaccaaaatgtgacacagagatgaagtgagcacacgctgttggaaaaatggcactgataaaagacttgctcaatgcagggtcaccacaaattctcaatttgtaaataaaaaaaccgcaattatctgcaaagcacaataaaacgaggtatacctatacatgcaacaaacacaaaaccggtaaactcaaaattcaggatgggcaaggaaatgaagtagggaaaggaacacacacaggaagcagaggtgactgaactggtcaggccaagtctcctcaagttgagtgacacaaatcagaatcactcaaaattgaaaggctaaccaaaacactgcaccgtcaatcacctacagcaccttcagtgaagtaagagcgctgcagggtgggtaggagcaattccctctgctgtgcttgaccctcatcagtaacaagcagagctaactctgacaggtggatggagtgcttctgctacccaatctcactgacagggaaacaggatcaaagattaagcaacctgctccagatcactgccaatgtctccaaattccagtgggtgaatgtccattttgagcttcagtaccactagtcacagtggtactcatctgtgcacctgcttaggtagtatattccattttcagcaagttctaattgcccatataaaacacatcagaggtacagagatctttaagcacaaaatgcaacactgagtctatctcatgccctttccaggacaagacaatgccaaaaaggaaaaaagcctgggcgcggaagtgagcacctatagtcccaactacttgagaggctgaggagggaagaggatgtcctgagcccaggagttctgggctatattgcatggtgccaatcaggtggccgcactacgtttggcatcagtgtggtgacctccaaggagtgggtactaccagattgcctaagaaggggtgaaccagcccaggtcggccagatgtggtggctcacacttgtaatcccagcattttgggaggccctggcgggcggatcgcttgaggccgggagttcgagaccagcctggccaacaaggcaaaaccccaactatattaaaatacaaacattaactgggcatggtggcgggcatctgtaatctcagctactcaggaggctgtggcacaagaactgcttgaacccgggaaacaggctgcagtgagccaagactgtgccactgcactccagcctgcacaaaagagtgagtgagactccgtctcaaaaaaaaaaaaaaaaaaaaagttgcggggccgggggggggggggggggtgggtcgcgtagtgaagaaaaaaaagaaagggggcaagtcaaaactcccatacctatcagcagtggggtcatgcatgtgactcaccactgtactccagcctgggcaacacagtggagacctcgtctcttaaaacggtaggttggctgggcgcggtggctcacccctgtaatcccagcactttgggaggcccaggcgggtgaattacgatgtcaggagttcgagagcagactggccaatgtggtgaaaccctgtctctactaaaaatacaaaaattagctgggtgtggtggcgtgcacctgtagtcccagctactcaggaggctgaggcagaacaatcgcttgaacccaggaagcggacgttgcagtgagccaagattgcgccactgcactcccgcctgggcaacagagcgagagtctacctaaaaaaaaaaaaaagtaatagtataagctgtgacactggatgaagaaagtggcaaaaataaaaatttgtaagaaaaaaattgaggacataaatttttaaaaagggggcaaaaaacataagctgaaactccttaaactttaaacatctgggctgggcgcggtggctcaaacttgtaataccagcactttgggaggccgaggcgggaggatcacgaggtcaggagtttgaaaccagcctgcccagcatggtgaaaccccgtctctactaaaaatacaaaaaattagccgggcatggtggcacacgactgtagccccagctacttgggagcctgaggcaggagaattgcttcaacccagcaggtgaaggttgcagtgagccaagattgcaccactgcactccagcctgggagacagagcaagactccatctcaacaaacaaacaaacaaacaaacaaaaataaaaactttagggccgggtgcggtggctcacacctgtaatcccagcactttgggaggctgaggcgagcagatcacaaggtcagatcaagaccatcctggctaacacggcgaaaccccatctctactaaaaatacaaaaaattagccaggcgtggtggtgggcgcctgtaatcccagctactcgggaggctgaggcaggagaatggcatgaacccaggaggtggagcttgcagtgagcagagcagagattgtgccactgtactccagcctgggcgacagagcaagactccacctccaaaaaaaaaaaaaaaaaaccaacaaactgtcaatctctggtaggtttaaaaggaatctttgctatcatctaaaagacaaacaacaattgtcggcaaagatgtggagaaactggaaccctcatatgtccagcaatgtaaaatggggcagccactgtaaaacagtctggcagttcctccaaaaggttaaaacataaataatgaatgtcccagaaattcctcccctacgcatatgccaagagaaagggaaacatttctacataaaaagtgtgtgtgggcactcacagaggtattattcataagagccaaaaactagaaaccaaaatatccatgaactgatgaacggatagtgtcatttctaaggatacaaccagattttctgaaattgggggtaggggaggggaatcaaagatgtttccttctcaaggagcaaaccgggtagtgtggcaatcaattctgaggctccatgctgcccttccaaggactgaggtactgtacccaagaatcactgtgccggagtgaaggacaaagcaatcaagtcatccaggcacaagtcacagaacactgagtgcggagagaggcagagcttgccaatctggcttcaccgggggctcctctcacctgttctctgtctgctcaagagttggtaagcaccctcgcacttaaaacattccaaaacccaagcttttgtggttacattctgaggcaatgcatagagaaatgttaattctgtgagccttttcaaggtgacatcaagacagaaactacttgctgtggaaatcattgtacaaagtgggtaggagtgagaagcccactgataggatgagtcccctgggagctgatgaaagggtgagatccaatccatttttaaacagtccttttttttttttttttttgaaagagagtctcactttgttgaccaagctgaagtgcaatggcgtgatctcagctcactgcaacctccgcctcctgggtgactggaactataggagcatggcaccatgtccggctgatttttggattccccccccccccccccccccccgaaggagtctcactctgtggcccaggctggagtgcagtggcgcgatctaggctcactgcaagctccgcctcccgggttcacgccattctcctgcctcagcttcctcagtagctgggactacaggtgcccaccaccacgcctggctaatttcttctattttgagtcgagacaggacttcaccgtgttagccaggaggtctcaatctcctgacctcgtgatccgcccgcctcggcctcccaaagtactgggattacaggcgtgagccaccgcgcctggccaatttttatagtttttattagagacggggtttcaccatactggccaggctggtctcaaactcctgatctcaggtgatccacctgcctcggcctcccaaagtgctaggattacaggcatgagccaccgtgcctggccttaaacagtcctttaggcagtcctgaaagacacctggctgcaccactgtttgaaccatctcccgtacctttgtgcctactcttcaccgatgcccaatatccatccccaaaatcagtttccgtgtggaggcaggatatggggaatttaaagcccctcagcaggcttccgcacccacgttcttagttctaacatgtgttcaaaaagtaagcaagatggccaggagcaggggctcatgcctgtaatcccagcactttgggaggccgaggcaggtggatcccttgaggccaggagtttgagaccagcatggccaacatggcgaaaccctgtctgtattaaaaatacaaaaattagccaggcatggtggcaaggggcctgtagtcccagctacttgagaggctgaggcacgagaattgcttgagcacaggaggcggaggttgcggtgagtcgagatcgtgccactgcactccagcctgggcaacagagcgaaactctgtctcaaaaaaaaacaaaaaaacaaaaaacagtaggcaggtggatatttgcacactcatgttcactgctgtattattcacaacagccaagaggtggaagcaacccaactccatcaacaaaggagtggaattctgacatgctacaacacggatggacctggagaacaggttattatgcttagtgaagtaagccagtaacaaaattctaaatactgtctgaatcggccaggtgcagtggctcacgcctgtaatcccagtactttgggaggcagaggtgggtggatcacctgagatcaggagttcaagaccaacctggccaacatgatgaaaccctgtctctactaaaaatacattaaaaaaaaaaaaattagccaggcatggtggcgggtgcctgtaatcccagctacttgagaggctgaggcaggagaatcacttgaacccgggaggcagacattgcagtaagccaacatcgcgccattgcactccagcctgggcaacaagaatgaaactccatctcaaacaaacaaacgaaaaatactcaacaaacaaaaaatactgtctgattctacttatatgaataactatggtagtcaaactcatagaaacagaaagtagaagactggctgccacaggctgggagaaagaaggaaaaggaagttattcgaaggatacagtgtcagctttgcaagatgaaaactttctagtgatctgctgcacgacaatatgcatatagtttacactgtaaaatggttaggatgttgcattttatgttttgaaacacatgcgtgtgcatgtaggcaaatgggttcagccgacattcctcaatactaacatgggaaaatgccctcacagggctgggtcaaatgaaatgccacacaaagcaagtgttcaataaacacctactactaataaaagcaagcatcggccaggcacagtagcttgtagctcccatttgtaatccctgcagtttgagcggccaagacaggcacattgcttgaactcaggagttcaaggccagcctgggcaatgtggtgagaccccatctctactaaaagtacaaaaaaggggccaggtgcggtggctcacacctgtaatcccagcactctgggaggccgaggcgggcagatcacctgagatcaggagttcaagaccagcctggccatggtgaaaccccgtctctactaaaaatacaaaaaattagctgggcgtggtggtgtgcgcctgtaatcccagctactcaggaggctgaggcaggagaattgcttgaacgcgggaggcggaagttgcagtgagccgagatcgcaccattgcactccagcctgggcaacaggagtgaaaatccgtcaaatcaaacaacaaccaaaaacaggctgtgcacggtggctcacatctgcaatcctagaactttgggaggctgaggtaggtgaaccacctgaggtcaggagttctagaccagcctggccaacatggggaaaccccatctctactaaaaatacaaaattagccgggcgtgggggcgcgtgcctgtaattccagctaccccagaggctgaggcaagagaattgcttagaagccgggaggcagaagttgcagtgagcggaggtcatgtcattgcactccagcctgggtgacagagcgagactctcaaaacaaaacaaagatgtcaggcgtagctactcaggagactgaggtgagaggatagcttgagactggagggtggaggttgccatgagccaagactgtgccactgcactccagcttggatgagggagaccctgtcttcaaaaaaaaaagtgtgaattgtggccgggcacggtggctcacgcccgtaatcccaccactttgggaggctgaggcgggcggatcacgaggtcaggagatcgagaccatcctggctaacacggtgaaaccccgtctctctactcaaaatacaaaaaattagccgggcgtggtggcggacagctagagtcccagctacttgggaggccgaggcaggagaatggtgtgaatccggaaggcggagcttgccgtaagccaatatcgtgccacttcactccagcctgggcaacaaagcaagactccatctttaaaaaaaaaaaaaaaaaaaggccgagcggtggctcatgcctgtaatcccagcactttgggaggccgaggcgggtggatcatctgaggtcaggagttcaagactaagcctggctgacatggtgaaaccctgtctctactaaaaatacaaaaaaatttgccgggcgtggtggtgggtgcctgtaatcccagctgctcaggaggctgaggcaggagaattgcttgaacccggcaggcggaggttgcagtgagccgagattgcgcactgcactccagcctgggcaacaagagcaaaactccatctcaaaaaaagtgtgaatgtaatgatttagtaagaactgtttaatgtattaatatttatatttcataatctgtaatcatggagtaaaagccaagcaggctgcatcacttgccctgcagtctcctagcacatgaactaatgggcaggcaggagggtgtgcatcatccaccttgcttaccgctgacctccagcacccagacaatccctggcactcagcacaagtaactgctcaataaccagaaacatcaagtgcttgccggaaaaactccatgatgagggagagggaagattacacagaccaaatttaagaatctctgccttaggaactcaggggctatcctgcctgaaccatcgataggggatattttcaagtcacctcaaccactgcttgactcactccaggtggacccaccactggcaccttctagtaccacagctcagccttgagtatgtgcttgaactttcgttcgcacttcacattttccacacacaaatataatgtgccaaaatgagccagtcctgctcccaaaaccctgctcacaaaatggaggacgtgagggtgtggacgcatagaatgaatgaaatgaaagatgtcagacaaagcaaattccaaagagaagtgggaaattttctagcctccaagaacagaggacaaaactattaaacatgatacttatctaggtcactagagttcactctaggacacattgttttggaaagaaaagcccttcaccattccccagattaaagcaaattcactaatctgtgttcttactacacaggggcctggctttctcaagtctgggaccctgctgggactcttatttccgacgtcctattgggaggagccctcacatccatcctcctggagatgcccaatgcccccaagtctggtctagatccacccttgcattccaggcttgcacatccaaccgcttcaatgacagcatccatgaggatgtcgacaagctccacatggtcaaggaactaaagtgaccccattttctctaaaacctgtcaaaacagggtgacaacagccctactgagtgttccaagcccccttcaaaggcccacttaccacaggggacagtggctaccaggctggataacccagctgcagaacagtcccaacactgcagaaagtccccctggacagcactgctttggaaattgggtaatacactgtaaaataagtaaggtctagaccagaccttggaagatggaggaaatggagtttggggggatgtctggaagaagaatcaaatgaacggaatgaggcaacagtgtgtcacagaacccaggagcccagggtgctacatgacaggagtgtaggtcttatcctatatgcagtgcggtttcagggtagcataatcatgctgtagtcatctattctattttgattgtgtacttttcaactagcttactagtagcactgtgcgtggagtttaaccacttctaccattttctctggactggctttgttttttttttccccccacaggtattcagagccaatttcctactgaatgagatcacgtgtcattttacgaagtcaaagaaaagatgtaaaagtaaaatccttcagggcacacctgttaaatgaatcaccacctttctagcacaggggtattaggatcttgtgcaacaatcaccaccggagacattaggatccctgaaacacctgcctcactcactgtcatgtctgcagtgaatgcagaacagtgtctgattaccaagtacatccagcacacgcattggacatggatgttgaccgagttccacttggtgtgcctgaggcaggcaggaaattctcttggaaacagaatccttaaggggattgggggggggaagcacccatgagctagaactcaattctaccctacagtaagcagcacttcaagggccgggcatggtggctcacgcctgtaatcccagcatgttgggaggaccaggcacgtgaatcacttgagatcagaagttaaagaccagtctgaaaatatagtgaagcctcatctccactaaaaatacaaaaaaaccagccgggcgtggtggccggcgcctgtagtcccagctacttgggaggctgaggcatgagaatcacttgaacccgggaggtggaagctgcagtgagctgagatcacaccactgcactccagcctgggtgactctgtctcaaaaaaaagcacctcaagaccgagaagcggccgggcgccatggctcatgcctgtaatcctagcactttgggaggccgaggcgggcggatcacgaggtcaggagatcaagaccatcctggtctaactcgatgaaaccccatctctactaaaaatacaaaaaattagccgggcgtagtggcgggcgcctgtggtcccagctacttgggaggccgaggcagaagaatggcgtgaacccgggaggcagagcttgcagtgagccgagatcgcgccactgcactccagactgggcgacagagcgagacaccgtctcaaaaaaaaaaaaaaaaaaaaaaaaagactgagaagctcaccataatcctgaaagagtatccagttcacaccataattttaacaagcctggggcacctggactaaagacacactccagtttacttacttccccccaaccatcccgcttctatattcccagacttgctctgagtagcaaaaggataaatggaagtgaaggcccggagcggtggatcacctgagatcaggagttcgagaccagcctggccaacgtggtgaaaccctgtctctaataaaaatacaaaaaaacagtcgggcatggtggcgcatgcctgtaatcccagcaactcaggaggctgaggcaggagaatcacctgaacctgggagacggaggttgcagtgagctgagaccacaccattccattccagcctgggcaacaagagccaaactccatctcaaaaaaaaagaaaaagaaaaagaaaaaatagaagtgaaaccaaatcaaggcaacttggttctctagcggaaactttttgaagatgaggttaaattccactcttgtgaatgtcttcatgagaaactcctcaggagggaagcactgtttttactgaccagatgtctgggtgaaaaggagacctgtccagtcagcattctgcatccctcttctgatcatcccctcacactggtgagcacctccaagggacaggtacttgctttcagacctgtccaggtctctttccaaacctctgctgtcctcattgaagaaccagactcaatgctagcccccttcctatgctcccagttggaaggtctcctccctctcaggctgccttgcctggacatcttggaaagcacttctgagctctaccctgtgctcactacgtatcatccaaaccatctgagttcactgagaacaaagctgaatatggtggactcccacagcttatgccacagcagacaagagctagtgggctctggacacaagtgctccaagtacttaccaactctgtgaccctgcaaccctgcccaagtgacagctctccaagcaccaccttccgtatctgcaaaccgggatgatactagtgcccagtgtatatggttgttttctgaggacttaaggaatgcgtagaggcttagaaatattcgctaaaacagaacaatcagcagcagtgtgctcaagctcagggtctggggagggcaatgtggcagtgaagtgaccaagtctgcagctccctacagcatcatggttgacacagaaactggactgatggatgtctggctccaccactttaaaacaggcatgcagtaagcaatagaaaaaaattaaggaagatgtcaagcatccagtcagaaaatgtagttttatactttacagggaagcctattcataggcagctatttgctacaaaccctgaacttttcagagtcaacaaagataaggactgctttaaggtgaacaatgggagtggggggtggtgggcaaggggtggtggtggtggtggtggtggtcaggaaggtcaggggaaagagacacaggccagaaagggtaaaccagctctcacaagtgcaaaggacatcagttaccagagcagacaggcctaaagactgaggataagcaagctgcaggcagcatgctacgcaactcaaaagggcccaatagagagaccgctctaacactggtaatttaaaactgcattcctgggattacagatagctgagctattattttgaaaaagatgaacacgaaggtggtattatttccaggcagctaatctgtcagctgaatggtttcctactgtcaaaaggaaaacatatgaagagtctcatacacacacaactctattacttggcagctttttataactgaaagtgcttcagagccaagtaatttttaatgaagattacaaatgaaaacaacctacacacagatagcaccacctttcacagaactctttcacgcacatgatcttatttctcttaattacaaaatagaaaggggaaactgcttaagttacaaaaatcatgcctgtacagtaagactgcaattcaactgagcagagaaatgggattaataaaagccaagaccaatggtacatgaatgagggaaaacatccattggcacatacaagtttaatcttcaaactatagagattggggcgggggggtgaaggagtctgtaataggtgctattcttagaagtaataagagttcttttccatcctctgactcaactctgccccaattacagaagtatgaattattcaagtttatggtattatatttcctattccttccaccagacaaggatgtgaggagaaagagagtggcactgtgtacactgcttggtgtagcatgtcgatatccctaaacgtaagcatgtcatgctgaagaatggtagtttcccacaagctttcttcctcaatctgcaggttccagtgcatgcgtaagcaaatgtcccgcagcacagggcacacattaagccacgtaagggaccacagcataaatcttgtaagcctacccacatccaacactaccacataaataatgaggctggctaggaaccattcagttaccttctggagcaaaggctccataccaacagcaaatcatggagacagtttacaaacagcagcagcttcagtgtagagccctagttccaagaccctcatctgcggcctttgcaacagacccattctggtacattctcaaattccttatccccaggaaagagcacaggctgacaaagttgggggcacaggggccctgggaaggttcacatcactgttgacacgttacctgacaactctgtgaaacctctggaggatttttgcaaggacaaaccaaaatgggtgatccaccctgtttccaagtcataaagttgtaaatgtctagaaaagtaagatacatgtgaaaaccagcctggcacagtggctcacctgtgtaatcccagcagtctgggagacaaagaaggcaggaggcttgctcaagttcaggagttcaagaccagcctgggcaacatagtgtgacctcgtcccttcaaaaaataaaaaaaaggctgggagcggtgcctcacacctgtaatctcagaactctgggaggccaaggtgggcagatcacttgagcccaggagttgcagcctgggaaacatggtgaaaccccatctccacaaaaatacaaaaaattagctgggcatggtggctcacacctgtagtcccagctacctgggaggctgaagtaggaggatcacctaggccaggaggccgatgctacagtgaatgactgcactccagcctggatgacaaagtgagacctcgtaccaaaaaataaaaataagctaggcatggtgacacacacctgtagttgcagctactcagcaggctgaggtgggaggatcacttaaacctgggaggtcaaagctgcagtgagccaagatcatgccactgcactccagcctgggcaacagagcaagaccctgtcttaaaaaataaaaataaaaagtattcaaaaccatcaagaggcagggtgaagtggctccgcctgtaatcccagcactttaggaggcctaagcagatgaactgcttaagcccaggactccagaccagcctgcctaagcaacatggtgaaaccccgtctctacaaaaaaataccaaaattagatgagtgtggtggcccacacctgtagcccagttacttaggaagctgaggtgggaggattacctgagtttggggaggctgagactacagttagctgtgatcatgccactgcactacggcctgggcaacacagtgagactctacctccaaaacaaaacaaaacaaaaaagccatcaatagccctttaaccaacatcgtaataaatttttcttccacagagtaaaatcaggaaattcattctggtacctggtctttagagttcaatgtttatgcctatgtgcatttttgtggagagaggatccaaagcatctgtagcatactcaaggagacctccagcctcctcttaaggagtgatgatctagagagaagcagggtcagtcccattcttagccactagactcaattattttgtgtctcctaaaggaataatatttccaacagtgagaactgtaggaaaacgattattacagtagaacttaacacttgtttttgattatggaaatctgaggaggcttttcgtaatgcttgaggaatgccaagcagcagactacgagaacttgagtatggaaatagcttagcaaatagcaaaattacaactgtaccttttgcaggcacggaagatagatgaatccagtctcctgaactaacaatagttactagtaataacaatataccatacagattacataagttatataaataacaacttgttatttatatggaagagagacctaatgtgataaacacaatttcaatcttgtaagcatttatttaaactttatatctacctggtctcttatccaagattttcctgaacactttaagctggtctcactcctgtgctcccttcagggctgttttcccgccaaactggatcattcagcccacccaagtaactcctgagacttggcttgacttctcccagagctccttctatgcctgacacaggtaagatacacagtgtctttcatttcatcttctacgaaaatatttgggatacacacatccttaactatcttcattctaccctttgtgagtaactcaattctgaactgttttccactaattctggtttacaaactagtatggaaacctcctttcagccatccataatttcttgctccaagttcgggggtacattttacttttagtataggactctgggccaggcatagtggctcacgcctgtaatcccaacactttgggaggccaaggcggatggatcacctgaggtcaggagtttgagaccagcctggccaacggggtgaaaccctgcccctactaaaaatacaaaaactagccgggcatggtggcgcatgcctctaatcccagctactcgggaggctgaggcaggagaattgcttgacccaggaggcagtgagccgagatggtgccactgcactccagcctgggcgaaagagcgagactccatcaagaaagaatgggaaagggaaaggaaagaaaggaaagaaaacaaagaaaaaagaaaaagagaaagaaggaaggaaggaagggaaagagggaggggactctgtccattggacaaagcatcccatctagcatgcctcttatcaacaagcgagatgctgctggagctaccacttgggttgagggaatggagggcagagaccagctacaggcgccatgcttgaggcaagccagttaagcattcccattctgcacatggtcagagatgggcaatgatccaacctagaatccactgccatcagaaagcactactgggaagactcactcttgaccttgaggtcagaacattagtgataaagaacaagtactgaagtcattgtggagcccttagattcaactactcttgagcctcatgttgcatcaggcaacaaactcccttctgtttcagctaattttgtttatttataccagagaaagacataagtaatacaaccatttcctcacagtcatctgaataaagttaggagaataacatctgagaataatcgacaagtagcttaccacacatgcacacaaatgacactctacatacttcttgtttcacctgtggcaaactactagaccttcaccactccatgcttctccaacttccctcaccctaccccctacaaagcttctaaaacacagtgggtacagggaagaaacgaaactaaagatccatgctttcacctgctactagaaagcatatccaggacagtcatcattgggcaaatgacaaagaaacagatcacaaaatggcacatacatacacacacacacaaatcaaggtattcacaattgccatcaagtagcatggaaaccaatgtaattcaactcctctgacatgacccccccataagaaacacattttatcatgtacacaacacctaagatcaaagcaaaggttttatgaaatatccttgaaaattgtgacaccctctgacatttcccttttctcccctatacaccaattgcaatccaccatatttgtttcatgacccatggttttgttttgttttgttttgttttcttctgagatggagtctcgctctgtcgcccaggctggagtgcagtgacacgatctcggctcactgcaagctccgcctcccgggttcacgccattctcctccctcaagccatgccatgacccatggttttaaaaacacaaagaaagccaggcgcagtggctcacgcctgtaatcccagcactttgggaggccgaggcgggtggatcacgaggtcaggagatcgagagcatcctggctaacacggtgaaaccccgtctctactaaaacatacaaaaaaaaaaaaaattagccaggcgtggtggcgggcgcctgtagtcccagcactttgggaggccgaggcaggcagatcacgaggtcaggagatcaagaccatcctggttaacacagtgaaaccccatctctactaaaaaatacaaaaaaaaaaaaaaaaaaaattagccaggcatggtggcaggtgcctgtagtcccagctacttgggaggctgaagcaggagaatagcgtgaacctgggaggcagagcttgcagtgagctgagactgcgccactgcactctagcctgggagatagagagagactctgtctccaaaaaaaaaaaaaaaaagaaaagaaaagaaaaattagccgggtgtggtggtgggcgcctgtagtcccagctacttgggaggctgaggcaggagaatggcgtggacctgggaggtggagctttcagtgagctgaaatcataccactgcactccagcctgggtgacacagtgagactctgcctcaaacaaacaaacaaacaaaaatacaaagaattattttcttccaattaattgggaggctgaggcaggaggatcatttgaacccagaagttcaagtccagcctgagcaacacagcaagactccatctctttaaaaaaaaaaaaaaaaaaaaaaaaaagaactgctctctcttaaaatccagattctgatcaaatttctctggaatcaaaacctatgcgccctactttatatatgaaaaactgaggctagagtggttaggcaacgggtccaaggacacaggcagatgtcccctgctgagtgtgccccagcagcccagtatggcccagactggcatccaccactgggctggcaggttccacctccatgtagtttttttgtttcaactctcatgataatgatctgctcccacaaaatatgtttcctcaaacagcatggaaaattttcaagtatgaagtccccaaatttttctcaccctcttcccttttctttacacaaaacaaaactttgaaggctaatccacccatagacatgtatgtgttactgcctgagaaggaacaactgcagacattagcaacacacaaggacacgagaattactaattcacgtttctgaaaattgtgtaataccaagcccaacacctctcccctggtgctggctgacaatgtaccagtgtctcctgactaacagcagctaggaacaaataaagagtttcagccttgagtggagaccaagacaaggaaggtgaccacacatactaagtaggaagggcctggatagcatttctcacactttttcaggcagaaagcaaagccagcactcctcggcccccatctttctcaacagtcccaggcatctttatacaattagacatgaggcccaggtcagtacccacatggtcccccttttgtcactgtgcaggcacactgatcccattttacagaagagaaaactgaggcttatggagacgatgtaactcccctgaggtcaaggccagaagggggtggggctgggactgcacccaacagtgaactccatggtgttctctctcctctcctgctctggtacacggctccacccaagcccaaccaatgctgtctgccacagcccaaggtcccagaaacttcctacactgggcagaacaggctaacacatgcctggggaggggggaaggggaaggatcacacaactgtctacacctaggataaacgaaaaatagaacaaatgtcaaatttattcacattctcttaatttgaagctaatgcttagattatgtgaccaacctctaaagaaaatatatctttcaattgcatttcacacaagcaaaaggcaacctttgtggaaccggatcccaatgacgcctagtaagtaactggacttaactggttcttctggtcaaaaggcccaaagtcgatcggcagtatgccagactcccagtcaggacctccacacatccagctgccaaaattactctaccaaacttttccagggagaccttacaccttcctggggaccagaatcctttcaccaagcccagatgccaatacaatcagaatcagagccaatggaggccagaaaggtatggaaagatgttccagtgttctggaaaaactttggcccaccagtgccttctggctccctgaccaagtctttgtgttcagataaccaggttttcataagatgggtaagttacattttaggcttgaggatacactgagccagcttcccctgctggatcatttccccaaactctgcagcaaacatcccagggtggatgcccccaaagctgctgcacctccactaatcccattatcactgctcttaatctcattatcagataaaaacaaacacaatccctctttcaagcacctcttccactggtctccactcagagctcacttggaagacgtggcacctctggaaggcacctggtgggctgtagtgtcacccagtaccatgccctggatcagctggtgcacctcctggctgtcagcagctctactctgacccctggcttcctcttcccacttctattcttcaccttgggcaaggacggcagtagctaaccttgagagggcacagcactgctgccaagccctgtgctgtgtgtcctctaaggcactgtctcattttaacctcatctgaaagatgggccaatgaagctctgggaaggctgagtgacagaatgaatgttacacagcaggtagcagggccaggattctaaccgaggcctgaatgtgccgtactggtgttatcagtctttggagcaaggcagcaaaaatgagataggactggatgccaagaggctgcccaagccctccaaggtcaccctccctagagcattccagttaagactggactgggctcgtactgccgggtcaggagacttgatttcaggaaacaaagtccaactctgggcaggagagggtagaaaagtcaaagggcaagagcctagagacacttctacttctcaccacattaaaaaagacacattttgttttcatacatcatcatttgtgggggaaaaaatgtttaaaatctcacccctataaacaagaccctgtcaagctctgattggagaaatggaaatacatgcaacctttccagaaaataagttaaatcaagttttcaaaaatatacacctcccaattcaaagatgaaaaaagagaaaacaccagatgaagtggctcacacctataatcccaccactttgggaggctgaggcgggcggatcacctgaggtcgggagttccagaccagcctgaccaacatggagaaaccccgtctctactagaaatacaaaattagctgggcgtggtggtgcatgcctgtaatcctagctactaaggaggctgaggcaggagaatcacttgaacccgggaggcagaggctgcagttagctgagatcgtgccattgcactccagcctgggcaacagagcaagactccgtctcaaaaaaaaaaaaaaaaaaaaagaaagaaagaaaaagaaaacttggaaatcatgtccaaatgtccaaaaatagcagaattaagttatggtacattcatacgacagctaagcagccagttaaaacgaaacattttggaaatgttcacaatgtagcattaaaaaaaaaaaaaaaaaaaaaggccgggcgctgtggctcatgcctgtaatcctaatcccagcactttgggacgccgaggtaggcagatcacttgaggcgagaggttcaagaccagtggggacaacatggcaaaatcccatctctattaaaactacaagaaattatccaggtgtggcagcatggggcgcctgtagtcccagctacttgggaggctgaggcacaagaatggcttgaaccggggaggcagaggttgcaatgagccagtctctgcatgggtgacagagcaaagacttcagcataggtgacagagcaaaactctgcctcaaaataaataaataaataaaaattaaaattaaaaacaaagaacttcactacaaccaaattgtgttactcagacaaagacaaataactggaaggaaagaaaatgggattaagagatcatttttaaccatcattttaacattctactttttccaaattccttaaaatgaccatgcactacttttgtttaaagaaaaagccttacaatctccttttcaaatgatgtggaacaaccaatgttattcctcttcaggacgaggacaagaatgggacagacggctgctctgccctcaccctgactcagaactctcttcctctgcttcttcagagtggactacattccatgaattatgctaggacatgtgcacgtggtttaattgaggttggtagcctgtcgagactgaaaacaaactgctttaaaacatcaccctttacaataaaggaactgcaagtttggggtgcatctccgagactgttctctatggagcagcatttcaaactgttctgtaaccatgcacaatgtaaaaaaccaaacggtgaccaaaccatgaaggcagaatacaacatgtcaacatgctgatatccttgcagttccacttcctcattcatttaaacagttactcagtatcccactaagcttttaaccattctacctaagtactagaaacatcaatgccattaaaaagtcgctgtgcaccctcaaaaacttaaacatagatatatgacccagcaattccactcccagatatctgtcccagagaaactaaaacctgtacgcaaaaggccaggcgcggtggctcacgcctgtaatcccagcactttggaaagctaaggtgggtggatcacttgagctccggagttcaagaccagccaggccaacatggtgaaaccccatctctactaaatagtaaacacaaaaattagccgggcatggtggcaggtgcctgtaatcccaattacttgggaggttgaagcaggagaagtgcttgaacccggggggtggaggctgcagtgggctgagatcgtgccactgcactccagcctgggcgacacagcaagactccgtctcgaaaaagaaaaaaagagaaaaaaaagtacacaaatgtatttttaacagtactattcacaattgccaaaaagtgaaaacaacccaaatgttcaccactaatgaatgggtaaacaaaatgtagcatagccatataatggagtatcattcagttataaaaaggaatgaagtactgattcatgctacacagcaagaaccttttggaaacagtacagtgagtgaaagatgccaggcacaaaaggttacatattgtaggattcctgaaatatccataacaggcagatccatagagacagagagtagatgagtggcttccaggggcaaaagtggcggggggtgggcaggagcatggggaatgataggtaatggatttcttttggggggggggggtggaaatgtcctaaaattggttgcagtgatggctgcaaatctctgtaaatacatttaaaaactgatgattgtatcatgtataacaacgtttatctcaaagctattattttcttaaaaagatgtttggtaggattttacaataatagtatgctcaaattatacataattgatattcaataaacgtggaggatgaacacgctaataataaagactacgcatattaaagtcattatacaaatatctttcagtctttccttgtacatagtaagggctcaaggactaattgtagagacagattggccaatcatgcacacataaaatcaaaatatttaaaaatgtgttcaatgtttaaaaaaaaacttaacaggtttttattgacaacatgagattcacattaagaaatgctacccatatgtgtttattgcccacttcatatccctcttgaaaatacttttggcaggtcagggttgaaccacagcgcaaagccactcaccgcacttcaaactgctaagtgggaaatgtccagtagtgcatggaaacacactgcatgccaggctgctcggactaataagtttactacaacaccgagggaccccagcgttatcttagttgaaactcacattccttgtaagtcactaccgaacaattatgtccacggctaacaacatttttaaagcgggattatttgcatttggcattacggcatgcaaaattcttgctcaattacttctcccgtttattcattgagactatttaaggtgctcttctaggcacaagatacaacagaataaaacaggcaaagccaagcaaacaaaaccctgccctcatccaacttacattctggttttgttttttgttttgggacggagtttcgctcttattgaccagactggagtgcaatggcatgaccttggctcaccgcaacctccgcctcccgggttcaagcgattctcctgcctcagcctcccgagtagctgggattacaggcatgcgccactatgcccggctaattttgtatttttaatagagacgtggtttctccatgtttgtcaggctggtgtcgaacttttgaccccaggtgatctgcccgcctcggcctctcaaagtgctgggatcacaggcgtgagccaccacgcccggcgcattctgctttttttttttttaagttaacaaggaaattttatctttccaaactcatctcttatgtattaaatgtcagcaccagcaaggaattccccacaattctcacctcgcaaatgtacactcttttctagacaccaaaaatcacaaagatttatgaaacattaggagctccaatgacaagcttatctttcctttttacagatttgccaggaacataaagacaaacatggtctactctacaagtttattcaaaatcagaaaccaaaacattttacattcacaaaatacaacacactatacagtaggttgtcagaagcagatttaacagcccagggtcttcaaatcactgaggtgccaaatggttttttgctttaaaaacaaaacaggccgggcgcagtggctcatgcctgtaaacccagtactttgggaggccgaggctggcggatcacgagatcaggagatcgagaccatactggccaatatgatgaaaccccgtctctactaaaaatacaaaaattagctgggcgtggcggcgcgtgcctgtaatcccagctactcgggaggctgaggcaggagactcgcttgaacccaggaggcagaggttgcagtgagccgagatcgcaccactgcactccagcctgtcgactgacttcagactctctcaaaaaaataaaaaataaaaacaaaacaaaattcaatctcttaaatctgtaaatctgaagtcattcaataacctgaattgtgaaacaagaaaatattgttacccccacctcctaaagcaaaagtgcaatttagtacaaagatcacaacaactggctcaaaaaggcaacttttagaaacaaagtctaaattcctttaaacaattcaataatttagtggaaatgttactaagtggccaatgattctcgttattcttagctaaaaattttccctcgctgtcctccagactagcgaagctaggcatatagcaccccagaacagccaaacaatccttaaaactcagcagctaccttcttatctttcatccgtaggcaaagttccttatcttcagcaattccactgggctgactgctagcaagatactcggaggtggactcgactccttccaattaagaccaactaaagccattctgagaccggctaactccagtttgagcctttaagatactatgtttcctaccaaagaaagaggtatggtggataacagagcagcaatacattttgtttcagattaggctttgccttctccatttgatcaatggaaaccctgagtggtttatctttccctggctgaagtttttggggggaagcgcttggttatctacaacgcatcagtgataagataaaaagataaaaaacataatccccacccaaattaaaccgaaataaatgctttatgaaattattggcggccgggaacggtggctcatgcctgtaatcccaacactttgggaagccgaggaggatggaacacctgaggtcaggagttcgagaccagcctggccaacatggtgaaacccgcgtctctcctaaaaatgcaaaaattagctagatgtggtggcgggcgcctgtagtcccagctactcgagaggctgagacaggagaatcgcttgaacccaggaggcagaggttgcagtgagccgagatcgcgccactgcactacagcctgggcgacagagcgagactccatctaaaagtatatgtatatattggcaagatcataaaacagattgtgccatcaaaaactttcttgaaattaaaaacacattcataaatccttttgagtatcgctttctttacaacttccaaagacggtagggaacttgacagctccattcacaaaaaactcccgaccattgttacagccccaaagagccactggcttacgaggtaaactgcgacttggtttttggaaccacggactggtagagccctgtcgaaggtaagcaaagacattccaattctcgtgaggcatacattccaaggggtcactagcatccaacacacacgcagagaaatgaacccaagaccagacaccccaccaggctgcacgaaacgtaaacaagtaaacaagcaaataaaaatcttaaaaaaacaaagcgtagtcttgagtaaaagggaggtcagccacccaggagaagcacatgactcatgcaccggcctgaactaaagtatttacaccgtccactacaacagagtggggtttcccatcttcaagcaaacccaagccttgggggcatctcagccgagtgaagccatgctatttccgtttgggaggagggggatcattttatttcgctgaatcacaactcccccacatccccaccccaaatcaccacaatcaccaccaccacacaacactgcaaataaaataggccgttgcaaggacgccggcgagcacggaccgagcaaaacaaagcgcccagcaaggggctgccaggctgagagtgggtgcgtcaagcgggccaagctcgcctccagggcaccgctcccgccctgaggcctggcctcagaccggcgtgcagccgcagccacctccctccgcaggggacctgcccctttctccgcagcactccggggaccgccgggaaggtgaagagatgggggtgggggcgcgctgccccggcccaggcaaaacgacctgggtgccagaaggagagcgcgccggccccggcccacgtgagcgccgcggccgagcccgcctagaggaccgcggaccgggacagctgcgctcgcggcccccgcgccaggccgggacttacccgggccgggcgcgccgcggaccccgcggcggccgcttcctcctcctcctcctcctcctcacttaacaaaatggcggcggcaggaagtgccgggcgcctcggcccgccccccgcccgcccccgaccgccggccccgccgcggcgcccgcgccccccacccgcgccccgccggccagcccaagcccgggtccgacggcaccaaaggcaggacagccgcgagcgaccccgccgccccgacaccaacggcgcaggccgccccggcccggaacgaacggcgcgggaggcccgcaggcccgagcccgcgtagccccggcctccccgcccccgcgccgcgcggatggcgtaggtggcggcgccccggccccattacgcaatgcaggttacgcggaccgcgccgcgagcctccgccagccgcccagtgtcgtccgccgccccaaagggcaccagtcctcacctgagacgctaggccgcacgccgcccccgccggccgtccgcccgctgccgccgccccctccccgagctgcctgcgcggcgccggggcccgcccgccgctctgccgagctcacaggccgcgctcgcccgcgggcaccgccggcagccgccgcagccgctgccgccgccactgcttcggctcctcggctgcgggagaccagaacaaacagcccagccgccgccgccgccgccgccgccgccgccagcgcactgacgtcaccgcgcacgctgcgcgcgcggccccgcgccgccgccgcccggtgtgcgcgccccgcccccgcgcccagcgcgaacgagctctggagagacagtggctgcgaggtgagtgggggataccgcggactgagggaggagaccccgcagagcgaaggagcgggctgggggaaacgggcggactgcaggctgggcctgcgggaaaagatctgaaggctgagagagacatccaaaatactaagaaaggtctgaagacagaccctcacagggagggaggatggtgaggagggaccccacagactgatggaggaggcggaggagagagccctaaggggggaccccaggtagggaggctgaggcgagagagctgcgatgggggcgccggggctggggtgaagtggaggaaaggaggtgagaggaggctgcgagcaaggccgaggcggatcctccttggctgcccctgggcagggaggtagcacctttctcctcttatgcccccctgttgatcttcttccaacccacctttttaaaaaaagggacatggtcttgctctgtcccccaggctggagtgcagtagtgcagtcatagctcactgcagcctcaacctgctggcctcaagcgatcctcctgcttcagcctcccaagtagctgggactacaggtgtgcaccaccacacccagctaactattttttgtagagatgggatctcacgatgttggccaggctggtctctgtctcctggactcaagcgatcctcctgcctcgacctcccaaagtgctagtattacaggcgtgagccaccgcgcccagctccttcccatccttaagactcaaccccaagtcagaccaggctcggtggctcacacctgtaatctcagcactttgggaggcagaggcaggaggttggcttgaggccaggggttggagaccatcctagccaacagagtgaaacctcgcctctactaaaaatacaaaaattagccccgtgtgggccgggcgcagtggctcacgcctgtaatcccagcactttgggaggcgggcagatcacgaggtaaggagatcgagaccatcctggctaagacggtgaaaccccgtctctactaaaaatacaaaaaattagccgggtgtggtggtgggcgcctgtagtcccagctactcgagagactgaggcaggagaatggcgtgaacccgggaggcggagcttgctgtgagcggagatcgcgcccctgcactccagcctgtgcgacagagcgagactccgtctcaaaaaaaaaaaaaaaaaattagccgggtgtggtggcgcatgcctgtaatcccatgcctgtaatgccagctactcaggaggctaaggcagaagaatcacttgaacccgggaggcgtaggttgcagtgagccgagattgtgccactgcactctagcctgggcgacagagcaaggctctgtctccaaaaaagaaaaagactcaaccctaagtcagctccaggacgtatgtgcctactctacatgtgtgagtccgaggggaaaaaacatcatatgacctcttctagggcttccaaagcaccccacctggccacggaagagcttagtaaacatggggtagttttgagattgctaaaaggaggaagttaggcatatgtctcttgtagcttaaaataatactgtgaaatttttcaaacctggaaacaaccacttctctttccttttatatatatatatatttttttttttaagacaagatcttgctctgtcacccaggctggagtgcagtggctggatcatagctcactgtaacctcaaactctcagtctcaagtgatcctcccacgtcagcctctttagtagctgggaccacaggtgtgcgccaccgtgcccagctaatttttgtatttttgtggagaggaggtctcaccatgttgcccagactggtcttgaattcctgggctcaagcgatccacctccctcagcctcccaaagtgctggaactacaggcgtgagccaccgcacccaggccattctcttagcattttgtattcccatcttttaaaaatggaaagcaggctgggcgcggtggctcacacctgtaatcccagcactttgggaggtcgaggcaggtggatcacctgaggtcaggagttctagaccagcctggccaacatggtgaaacttcgactctactaaaaatataaaaattagccaggtatggtagcgggtgcctgtaatcctagctactttggaggctgaggcaggagaatcacttgaacccaagaggcagaggtggcagtgagctgagatcgtgccactccactccagcctgggcgacagtgagactccatctcaaaaaaaaaaaaaaaaaaaaaaggaaagcaaactcagttctaaaaagtctacatggggccaggcacagtggctcacacctgtaatcctagcactttgggaggccaatgcgggtagattacctgaggtcaggagtttgagaccaacctgggcaacatggtgaaaccccgtctctactaaaaatacaaacaaaattagccgggtgtggtggcgggcacctgtagtcccagctactcaggaggccgaggcaggagaatcgcttgaacctgggaggtggaggttgcagtgagccaagatcatgccactgcactccagcctgggtgacagggcaaaactccgtctcaaaaaaaaaaacaaaaaagtctgcgtggtattttttttttaagtccaagtaatgaaacatttcctgatggcccatggtttcagaatatatggatataataggataccagtaaaatagttcttttctatcatgtgtttgctcatgcttaaccaggggcaatcataaatcactaatgggtcctaagcaaagttaaaaattaaattttttcattcattcatgtatctatgtattaatttattcatttatgacagggtcttgctctgttgcccaggctggagtgcagtgttgcattcatggttcaccaaaggctggagtgcagtgttgcattcatggttcaccgaagcctcgacctcctaggctcattcaatcctcccacctcagcctcccgagtagctgggactacaggcatgtgccactacacccagctaagtttttaaattgtagttggctgggcgcagtggctcacgcctgtaatgccagtactttgggaggctgaggcgggtggatcacctgaggtcggtagtttgagagcagcctggccaacatggtgaacacactagtctgtactacaaatacaaaaattaaaggccgggtgcagtggctcatgcctgtaatctcagcactttgggaggccgaggcaggtggatcacctgaggtccggaattcacaactagcctggccaaggtggtgaaacctcatctgtactaaaaatagaaaaaatttgcggggcttggtgacaggtgcctgtaatcccacctactcaggaggctgaggcagaagaatcacttgaacccaggaagcggaggttgcagtgagcagagattgcggaggtggaggatacagtagtgagcggagatcgcgccattgcactccagcctgggcaacaagagtcaaactctgtctcaaaaaaaaaaaaaaaaattagccaggcatagtgttgcatgcctgtaatctgagccacttgggaggctgaggcaggataatcacttgagcctgcttaagaggtggaggttgcagtgagccaaggtcgcaccactggactccagcctgggtgacagagcaagactctgtctcgaaaaaaaaaaaaatttgtagccataggatctcactgtcttggccaagctgatctcaaactcttggcctcaagtgattcttctgccttggcctaaccctttatttttaacaaagcatgagaaaacaagttattagctgcaagaaataaaggatgtaattgtaactccttcattgaaacttccttctaactctgtattacagaatattgaaatttgtgaatatcttctggctcctaattttgcacccctggcaattatgcagaagatgatcagaaatggaaaaagagcaggagggtacccagggctttgtgaataggtattaacaactggtttgttgttactgggttttttgtttgtttgtttttttaaggaaaccagaatgtatctattttaagctctccttccctatagttatcttgtcttgctgcattatccacttaatttatcattgttggccaggcgcggtggctcacgcctgtaatcccagaactttgggaggctgaggcgggcagatcacgaggtcaggagatcgagactatcctggctaacatggtgaaaccccatctctactaaaaatacaaaaattagccagacatggtggtgagtgcctgtagtcccagctactcgggaggttgaggcaggagaatgtcatgaacccgggaggtggaggttgcagtgagccgagatcgtgccactgcactccagcctgggtggacagagcgaggctccatctcgaaaaaaaaaaattatcattgttgttgacaataaatgtttttggaagtaatttggaactgttggtttgcaaatcacataataaaagccctcactttactgtagagtcacacttaacattagacaaaactatatatctagattgataactagaccgaactaggtggcttttggccattgctacaaattaaatccaacctggaaaaaatattcaggctgtaaaggcagttccaaaagctgtctccaaaaatcgtttgggacaacaatgtctcattctttttgtcttccatggtgctttgcctaactcctcgaagatagctcaaactcagaaaatgtttatctggttgagtcactttaataaaaatagtcttgttacctcatggttcacatgttatttatttatttatgaaacagtctcactctgtcgcctgggctggagtgcaatggcatgatctcggctcactgcaacctccacctcctgggttcaagagattctcgtgcctcagcctcctgagtagctggaattactggcatgtgccaccacgtccggctaattgttttgtatttttagtagagacgaggtttcaccatgttggccaggctggtctcgaactcctggccttaagtgatctgcccacctcggcctcccaaagtgctgggattacaggcttgagccatggcacctggcttatttatttatttattaagttataaagacaagatctcaccctgtcacccatgctggagtgcagtggcataatcatagctcactgaagcctcacccttctccactcaagcaattctcccacctcagcctcctgagtacatatgactacacccatgccccaccacacttggcttttttttttatttattttttttgtttgtttgtgttttgtagcaataaggtttcactatattgctcaagctagaatgcagtggctattcatagacacaatcatgtctgactatagccttgaactcctgggcgcaagcaatcctcctacctcaacctcctgagtagctgggactatagctgcctgcccagcttagattttaattctatgcatcaatgtgtatcaatgtatagaaatagttatgttatttaaacaaaagggatcatcctatatctgttgctttttgctgttttcttttttttagacagagtcttgctctgtcacccaggctggagtgcagtggtgcgatctcggctcactgcaacctctgcctccagcttcaagcgattctcatgcccctgcctcccaagtatctgggactacagacatgcgccaccacagctatttaattttaatatttttactagagacacggtttcaccatgttggcccgactggtctcagaatcctggccctaaatgatccgcccacctccgcctcccaaagtgttgggattacaggcatgagctaccgtacccagccagcttttttaatttaatacatacagcccagaactcctagactcaagcgatcctcccagtccacctcagcataccaaatagctgggactacaggtgcatgccactgtgtctggctggaagtcatttcacgtgaatactctgagatctgccttattggagatgatgtcaggatcacatacagtatgttatctatctcagataacatggtggctcatgcctgtaatcccagcactttgggagactgaggcaggtggatcatttgaggtcaggaatttcgagaccagcctggccaacatggtgaaaccccgtccctactaaaaaaacacaaaaattagccaagtgtggcggtgcacacctgttgtcccagctacacgggaggctaaggcacaagaatcacttgaacccaggaggtggaggttgcagtgagctaagattgcgccactgcactccagcctgggagacagagcaagactccgtttaaaaaaaaaaacaaaaaaaacactaaactaaaaaacgaaggaaaaagaaaacatggagttgttcctttggccacatgcatgcaaatctgtaagaaaagtaatgttgtagacatcaagggaatgggtactgttcacaaaggaatgccccacaactgttatcatgcaaaactggaagagtctacagtattaccaagcatgctgttgggattcttctaaacggacaagttaagggcaaaattcttgccaagagaattcatgtacgtattgagcacattattcactctaagaggtcaggagttcaagaccagcctgaccaacatggtgaaaccttgtctctactaaagatataaaaattaggtgggcatgatggtaggcatatgtaatctcagctactcaggaggctgaggcaggagaatcacttgaacctgggaggcgaaggttgcagtgagccaagatcacgccactgtactccagcctgggcaacagaacgagataccgtctcaaaaaataaaaataaaaaataaaagatcaatagactgtttaaaaaaaaaaaaacaaggataaatttatatagcatgttcagctctgaaaacatcagaaaggttgggtgtggtggctcacacctgtaaaaccagcactttgggaggccgaggagggtggatcacttgaatccaggagtttaagaccagtctggccaacatggcgaaatgccacctctacagaaaatacaaaagaaattagctgggtatggtggtgcatgcctgtcatcccagctatttgggaagctgaggtgggaggatcatcggagcctgggaggtagaagttgcagtgagccacaattgagcctctgcactccagactgggcaatggagtgagaccttgtctcaaaaaaaaaaaaaaaaaaaagggaaaaagaggccgggctccgtggctcacacctgtaattgcagcactttgggaggccaaggtgggtggatcacctgaggtcagaagttcgagaccagtcttgccaacatggtgaaacccgatctctaataaaaatacaaaaattagccggtcgtggtggtgtgtgcctgtaatcccagctacttgggaggctgaagcaggagaatcgcttgaacccgggaggtggagtttgcagtgagcagagatcgcaccactgcactgcagcctgggagacagagcaagattccgtctcaaaaaaaaaaaaaaaaaaaaaaaaggagctggaggatttgtgtcttgtatcaatgcccactttccaatgggaacttgcccacaaagttacattctagaatttatagttagacctagagaaggcaagtgagtcacccaaggtcacacatttacacagagttgagaacctagatatcctgactctgtaaagattgcttgcatttttttcccctagcccaggggttgacaaactttttctggaaagagccaaatactcaacattttaggcttagagggccatacaatctctataacatggccaattttttaaaaatttttttgagacagagtcttgccgcgttgcccaggctggagtgcagtggtgtgatctcagctcactgcaacctctgcctcccaggttcaagtagttttcatgccgtggtctcccaggaagctggaattacaggcatgtgccaccatgcccagctaatttttgtatttttattagaaacagggtttcaccatgttgcccaggctgctcttgaactcctgacctcaggtgatctgcccgcctcaggttcccaaagtgctggggttacagatatgagccctacagcgcccggccttttttttttcttttagtcagggtctcattctctcacccaggctgcagttgcagtggtaccatcagggctcactgcagcctcaacctcctaggctcaagccatcctcttgcctcagccttccaagttgttgggactgtaggcacatgctaccatgctgggctgttttgtttttgtttttgtttttgtttttttgagatggagtttcactctgtcacctaggctggagtgcagtggcgtgtgtctcagcgcacttcaacctctgcctcccgggttcaaatgattctcctgcctcaggctctggagtagttgggactataggcgtgtgccaccacacccagctaatttttgtatttttagtagagacagggtttcactatgttggccaggctggtcttgaactcctgacctcgtgatctgcctgcctcggcctcccaaagtgctgggattacaggcaggagccactgtgcccagctgtttttttttttcattatttttagtagacatgggggtctcatttaagttgcccagtgtggtctcgaactcctgggctcaaatgatcctcttgccttggccttccaaagtgttgggattacaggtgtgagccactgagtccagctacactgttaatttttgtagctgtaccattgtggcacaaaaacagccatagataatatgtaaacatatggcatgactggcaataaaatgttacggatactaaaatgagagtttcgtatacatttcatgagtcacaaaatgtcattattttgacttttgtcaaccttttatttatttatttatttatttatttatttatttatttattttttagacggagtttcgctcttgttgcccaggctggagtgtggtggcgcgatctcggctcaccgcaacctctgcctcccgggttcaagcaattctcctacctcatcttcccaagtagctgggattacaggcatgcgctatcacacccggctaattttttatttttagtagagatggggtttctccatgttggccaggctggtcttgaactcctgagcacaggtgatcgcccacctcggcctcccaaagtgctgggattacaggcatgagccaccgcgcccggctgtcagccttttaaaaaatataaaaaccattcctcactggaaggctgttcaaaaacggtggctgagatttgtcttgtaggccatatagtttgctcgtcccagttctagactctcaagcctagagaagcagaaatttctttacatgcatcttttttatttgtttgtttaagacagggtctctcggctgggcacagtggctcacgcctgtaatcccagcactttggaggctgaggtgggcagatcacgaggtcaggagatcgagaccatcctggctaacacggtgaaaccccgtctctactaaaaatacaaaaaattagccgggcgtggtggcggatgcctgtagtcccagctacttgggaggctgaggcaggagaatggcatgaacccgggaggcagagcttgcagtgagccgagatagcaccactgcagtccggcctgggcaaaagagtgagactccgtctcaaaaaaaaaaaaaaaaaaagacagggtctctctgtcacccaggctggagtgcagtggcacgatcactgcagccttgacctcctggactcaagcaatcctcctgcctcagcctcctgtgtaactggaaccatacacaggtgcatgccaccacaatgggctaacttttgcattttttattgtgacggggttttaccatattgcccaggctggtcttgaactcctgggctcaagagatcctcccacctcaacttcccaaagtgctgagcttgcaggcatgagccactgtgcccagcctacaagtctcatttctgtaatgatacagaagctactctgctataatttttaaaaaattaatagactattttgttagcagttttaggtttacataaaaattgaggccaggtgcagtggctcacgcctgtaatcccagcactttgggaagctgagccaggtggatcacctgaggtcaggagtttgagaccaccctgggcaacatggcaaaaccctgtctctactaaaaatacaaaaaattagccgggcatggtggcgcgcacctgtaataccagctacttgggaggctaaggcaggagaattacttgaactcaggaggaggaggttgcggtgagccgagatcgcgccactgcactctagcctgggcaacagagcgagactcaatctcaaaaaaaaaaaaaaaattgaagctgggcgtggtggctcacacctgtaatcccagcactttgggaggctgaggcgggtggatcacctgaggtcaggaattcgagaccagcctgcccaacatgaaaccccgtctctactaaaaatacaaaaatattagtcaggtgcggtggcacacacctgtactcccagctattcaggaagctgaggcaggagaatcgcttgaacccaggaggcagaggttgcagtgagccaagatcgcgccattgcactccagcctgggcaacaagagcaaaactccatctcaaaaaaaaaaaaaaattgagtggaaagtacgattcccatatatgcccttactactaccctccaccccattttccccaatctcagcattaacattagtgtgctacatttgttacagctgatgagccagtatagatccaataccgatacattattaactaatacctgtactttacattagggttcattcactctgtgttgtatattctatgggttttgacaaatgtataaacacatgtaggccggacatggtggctcatgcctgtaatcctaacactttaggaggccgaggacgggggatcactagagcccaggaggtcgagaccgtcatgggcaacatggtgaaacctcatctctgcaaaaatacagaaaattagccagctatggtgtcacatccctgtagtcccagctacttgggaggctgaggtgggaggatcacctgagcctgagaggtccaggctgcagtgagccaagatcacaccgctgtattccagcctgggcaatagagtgagaccctgtctcaaaaagtgaaaataaagacatgtatatactattatgcttgccagtttgtttatttgttttgctttgagacagggtcttgcgctgttgcccaggctggactgcagtggcatggtcgcagcacactgcagcctcaacctgctgggctcaagcgatcctcctgcctcagcctctcaagtagctgggattataggtgtgtgccatcatgcctggcaatttttttcttttttttagtagagatgaggtctccctatgttgcctagtctggtctcaaactcctggactcaagtgatcctcaccaaagcctcccaaagtgcaaagattataggcgtgagccaccatgcgtccggcttgcttgccgttgtttttgtttgtttgttttgttttgttttgtttttgagacggagtttcactcttgttgcccaggctggagtgcaatgccgtgatcttggctcaccacaacctccgcctcccgggttcaagcgattctcctgcctcagcctccggagtagctgggattaccaagtagctgggattacaggcatgcgctaccatgccagggtaagttttatatttttagtagaactgggatttcaccatgttgaccaggctggtctcaaattcctgacctcaagtgatccacccacctcagcctcccagggtgctgggattacaggcgtgaaccactgcacccagcctgcattttttttacaaacagattttcgccatgttgcctacactagtctcaaacccctgggctcatgtgatcctcctacctcggcctcccaaagtgctggaattaaaggtgtaagccaccgtgcccatccagttgacaaagtttatttctttttttttcttttgagagagagtttcactgttgttgcccaggctggagtgcagtggcgtgaacttggctcactgcaacctctgccccccaggttcaagccattctcctgcctcagcttcctgaatagctgggattacaggcatgtgccacaacacctggctaattttgtgtttttagtagagacggggtttctccatgttggtcaggctggtctcgaactcccagactcaggtaatcctcccgcctcagcctcccaaagtgctgggattacaggcatgagccactgcgcctggccgacaaagtgtatttcaaacactgcggagaattgttgtggtcttaattcatttggggtaatcggtattgtcattctcattgtcctcttgtgaggaggaattaggaacttatgtctctctagggaggctacagttttccttttggggaccattgtagtagagaattctcacattcacacatttcatttccctaaagttagtcaccggcccatgtgggtaatctctaaagaggacaacaagtatttagcagttatttcagagataattttctgccagcaaatatgggaaacttgcatgcatttttgaactctgcctcttcacatctatttagagaaatgttcccaagtctttgtaggcatctgagaagccaaaatccccaggcatttcccacagggcaggatcggttgtcgttttgagtgggtagcgatgggctgggtggcctattaagtgaaaacatggtgatctgtgcacccacaatgcctaggccctgcagacacaaatgcccaacttgttgacctgtgactcagacttagacccgaaaaggagatgttatatacactctgttctttattgaaataatccagcttgaatgagttggctggaaatataggatttgtaggaataaacggtcttccacatcaacataatggaattcagttgagaggaatattactggggatgtaaatatgctttaaacacaggctcgcggtggctcacacctgaaattccagcacttccggaagctgaggcaggcgatcacttgaggtcgggagttggagaccagcctggccaacatggcgaaaccacatctctactaaaagtacaaaaaaattagctggctatggtggtatgtgcctgcaatcctagctactcgggaggatgaggcaggagaatcgcttgaacccaggaggcggaggttgcagtgagccgagatcgtgccattacactccagcctgggagacagagcagcactccgtctcaaaaaaaaaaaaaaaaaaaaagaaaagaaaagaaaaaaaaaagaggctgggtgccatggctcacacctgtaatcccatcaccttgggagaagtttctcttaagcccaggagtttgagaccagcctgggcaacatggagaaaccctgtctctacaaaatatacaaaaattagcagggcgtggtggtgcatgcctgtagtcccagctactcaggaggctgagatgggaggatcacttaagcctaggagattgaggctgcagtgggctatggttgtgccactgcactccagtctgggcaacagagcaagaccctgtctcaaaaaaataaaaaaaagaaaagaataaaagtgttacaacaatgccagcactgtactggaagacagtaatcaaagaagtaaaactgtatctattcacagatgatgtgattttatagatacgaaatcctgaagaacacacacacacacacacacatacacacacaaacttattagagctaatacattccacaaaattagcatccatgatcaacacacaaaaacctcttacttgtatttctgtacactggcaacgaacaacccaaaaatgaaattaaaaacattctcggccagatgcagtggcttacgcctataatcccagcattttgggaggctgaggcgagcagattgcctgaggtcaggagttcgagaccatcctggccaacatggtgaacctctgtctctactgaaaataaaaaaattagccaggcgtggtggcaggtgcctgtaatcccagctactcagcaggctgagacaggagaatcacttgtacccgggaagcggaggttgcagtgagccgagattgtgccattgcactgcagcctgggcgacaagagtgagactttgtctcaacaacaacaacaaaaaaattatcaggcagaccccctgagtacaaacaaaaaattttttttttgagacggagtctcactctgtcgcccaggctgtagtgcagtggcgcgatctcggctcactgcaagctctgcctcccgggttcacgccattctcctgcctcagcctctcaagtagctgggactacaggcacccgccaccacgcccggctaatttttttgtatttttagtagagacggggtttcaccgtgttagccaggatggtctatgatctcctgacctcgtgatccgcccgcctcagcctcccaaagtgctgggattacaggcgtgagccaccgcacccggcccaaaatttttaattaaaaatgttttaaataggctgggttcagtggctttcacctgtaatcccagcactttgggaagccgaggcgggctgatcacttggtatcaggagtttaagaccagcctggccaacatggtgaaaccctgtcactactaaaaatacaaaaattagctgggtgtggtggcatgcaccagtaatcccagctactcagacgttgaggcaggagaatcgcttgaacccgggaggctgaggttacagtgagccaagatcacaccattgcactccagcctgggcaacagaatgaggctgcgtctcaaaaaaaaaaaaaaatttatggtagctcacacctgtaatcctaccactttgggaggccggggtgggtggatcacgaggtcaagagttcaagaccagcctggccaacatggtgaaaccccgtctctactaaaaatacaaaagttagctgggcatggtggtgtgcgcctgtaatctcagctactcgggaggctaaggcgaagaattgcttaactgggacccaggaggcagaggttgcagtgaaccaagattatgctggcactgcactccaacctgggctgcagagcaagactctgtctcaaaaaaaaaatttttttagtccgggcacggtggctcacccccgaaatcccagcactttgggaggctgagggcagatcatgaggtgaagagatcgagaccatctggccaacatggtgaaaccctgtctctattaaaaatagaaaaatttgctgggcgtgcgcctgtagtcccagctactttggaggctgaggcaggagtatcgtttgaacccgggaggcggaggttgcagtgagcccagattgcaccattgcactccagcctggcgacagggcaagattctgtctcaaaaaaaaaacaaacgaaagaaatgttaaaacttcattttacaatagcatcaaacatataaaaaatacttaggaacaaaagaggtccaagcctgggcacggtggctcacgcctgtaattccaggactttgggaggctgaagcgggtggatcacagggtcaagagatcgagaccatccttgccaacatggcgaaaccccatctctactaaaaatacaaaaatcagctgggtgggtacagtggcacacgcctgtagtcccagctactcaggagacggaggcaggagaatggcttgaacctgggaggccaaggttgcagcgagctgagatcgcaccactgcactccagcctggtgacagcgcgactccgtctcaaaaaaaaaaaaaaaaaaaggcaatattacctcagttgatctgtagatttcctgtctgatatctctgtcagagtaccagctgggtttgacaagatgaccctaaagtccatataaaaactcaagggctggggccaggtgcagtggctcacgcctgtaatccaagcactttgggaggccgaggtgggcggatcacctgaggtcaggagttcaaaacctgcctgaccaatatggcaaaacgccatctctactaaaaataacaaaaattagctggttgtggtagcacgtgcctgtaatcccagctactctgggggttgaggcaggggaatcgcttgaacgtgggaggtggaggttgcagtgagctgagatcgcgccactgcactccgcattgttgacagagcgagactctgtctcaaaaaaaaaaaaaaaaaaggcctggtgcggtggctcacacctgtaatccaagcactttgggaggccaaggcgggtggaccacgaggccaggagatcgagaccatcctcactaacacagtgaaaccccgtctctactaaaaatacaaaaaattagtggggtgtggtggcaggcacctgtagtcccagctattcgggagactgaggaaggagaatggcgtgaacctgggaggcggagcttgcagtgagccgagatcacgtcactgcactccagcttgggcaacagagagagactccgtctcaaaaaaaacaaaaaacaaaaaacagggacacagaataaccaaaacaatcttgaaaaagaggaacaaagtcggaggagtcacagttccttatttattttatttattcatgtttttattgttattgagatggagtctcactctgtcgcccaggctggagtgcagtggtgcaagctcagctcagtacaacctccgcctcccaggttcaagtgattgttctgcctcagcctcccaagtagccgggattatatgcatgcgccaccacacctggctaatttttatatttttagtagagatagggtttcgccatgttgggtgttggccaggctgatctcaaactcctgacctcaggggatccacctgccttgacctctcaaagtgttgggattacaggcgtgagccactgcacctgagcttgtatttattcatctattttatttatttatttatttgagatggagtctggctctgtcacccaggctaaagtgcagtggcacgatctcagctcactggaacctctgcctcccagttcaagcaattctctgcctcagcctcccaaataactgggattacaggtgcctaccaccatgcccagctaatttttttgtatttttagtagagacggggtgtcaccatcttggccaggcaggtcttgaactcctgatctcatgatccacccgccttggcctcccaaagtgctgggattacaggcgtgagccaccatgcccagcctatttatttttcttgaacacagtctctgtcactcaggctagagtgcagtggcatgatctcagttcactgcaacctctacctcccaggctcaggtgatactctcacctcagtgtctccactaactggaacttcaggtgcccaccaccatgcccagctaattttttgtatttttggtagagaagaggtttcaccatgttgcccatgctggtccccaactcctgagctcaggtgatccacctgcctcggcctcgcaaagtgctgggattactggcatgagccactgtgcctggccgactttgagttatttattattttaatttaatttttgaggcagagtgtcgtcactttgttgcccaggctgggtggattacaggtggcacggtatcagctcactgcaccctccacctcctaggctcaaacgatcctcccacctcagcctcccaagtagctgggattacaggtgcatgtcaccatgtccagctaattttttttgttgttgttgttgagacagagtttcactcttgttgcccaggctggagtgcaatggcatgatctcggctcactgcaacctctgcctccctcctgggtccaagcgattctcctgcttcagcctctagagtagctgcgattacaggtgcgcaccacatgcccagctaattttttgtatttttagtagagacagggtttcaccatgttggccaggctggtctcgaactcctgacctcaggtgatccacccatctcgccctcccaaagtaaatgggattacaggcgtgagctaccgctcctggcctgtccaggtgatttttatatttttagtagagatgaagtttcaccatgttggccaggctggtctctaactcctggccttacctgatctgcctgcctcagcctcccaaagtgttgggattatgggcatgaaccgctgcctgactttaaatcttacttcaaagcacagtgacataaggatagatacgtagaatagaatagagctgacagtccagaagtaaaccatgtagttatatggtcaactaacttttgacaagggtatcaagaccattcattgggggaaagaacagtctcttcaacaaatactgttgagacaacgcgataagccacatggagtgaagttggacccttaccttacacgtatataaaaattaacttggccagaggcagtggctcacgcctataatcccagcactttggaaggccgaggcaggaggatcacttgacatcaggagttcgagaccaacttggccaacatgatgaaaccctgtctctactaaaaatacaaaaagtagccaggcgtggtggcacaattttgtaatcccagctactcgggaggctaaggcgtgagaatcacttgaactgaggaggcagaggctgcagtgagctgagactgcgccactgcactccagcctggacaagagaatgagattccatctcaaaaaaaaaaaaaaaaaaaaaaaattggccgggcgcggtggctcacgcttgtaatcccagcactttggggaggccgaggcaggcggatcacgaggtcaggagatcaagaccatcctggctaacaaggcgaaactccgtctctactaaaaaatacaaaaaaattagctgggcgtggtggcgggcgccagtagtcccagctactcgggaggctgaggcaggagaatggtgtgaacccgggaggctgagcttgcagtgagctgagatcgcgccactgcactccagcctgggcgacagagccagactccgtctcaaaacaaaacaaaacaaaacaaacaaaaattaaaatgaactacagacctaaatatgagctaacattattaaattattggaataaaacatagaagtaattttttttttttgagatggagtctcactcttgttgcccaggatggagtgcaatggcatgacctcggctcactgcaacctccgcctcctgggttcaagaaattctcctgcctcagccttctgagtagctgggattacaggcacctgccaccacacctggctaattttttgtatttttagtagagacggggtttcaccatgttggctaggctggtctctaactcctgacatcaggtgatccacccgcctcagcctcccaaagtgctgggattacaggcatgagccacaacgcccggcttacaagacttttttttccagatggaatctcgctctgttggctcaggctggagtgcagtggcgtgatctcagctcacttcaacctccacctcccaggttcaagcgattctcctgcctcagcttcccgagtagctgggattacaggcatctgccaccatgcctagctaatttttatatttttagtagagacggggtttcaccatgctggccaggctggtcttgaactcctgacctcagaccatccacctgccttggcctcccaaagtgctgggactacaggcatgagccaccatgcctggctacaaggcttttaaaaattagctgggcatagtggtgcactcctgtagtcccagctaatcaagaggctgaagtgggaggatcacttgaaaccaggatttggaggccgcagtgagctgctgtggtgccaccgcactccagcctgggcaacagtgagatcctgcctgtaaaaccaacaacaacaacaacagaattatgtagtttcaccaagaggtggaaggtggaagagcctcactgacattcagaccaatttaatgacaggtcttggattgacatatacatattttgaaacgaaattttgctcgtcgctcaggctggagtgcagtgatgcagtatcagctcactgcaacctctgcctccagagttcaagtgattttcctgcctcagcctccagagtagctgggactacaggcacctgccaccacgcctggctaattgtgtatttttagtagagatggggtttcaccacgttggccaagatgctctcgatctcctgaccttgtgatctgcccgccttggcctcccaaagtcctgggattacaggcatgagccaccacacctggcctgatattttatttttttgagacaaattcttgctctgttgcccaggctggagtgcagtagcgcaacctcgactcactgcagcctctgcctccctggttcaagcgattcttctgcctcagcttccccagcagctgggattacaggtgtgtgccaccacacccagctaatttttgtatttttggtatagacagggttttgccatgttggccaggctggtcttgaactcccgacctctactgatccacctgcgttggtctcctaaagtgccaggaatacaggtgtgagccaccatgcctggccgggtcttggatttttataagaagaaaaaaaaggtgtggggtaggggagagccaggtgcagtagctcatgcctgtaatcctgggaggcagaggttgcagtaagccaagatcacgccactgcactccagcctgggcaacagagtaagactgtctcaaaaaaaaaaaaaaaaagaaaaaaaaaagaaaattaaggaaataaagcagttccactagtgatgtttttctgcactactgtttaatgctaccgacatttttgccttaagagaacaagcttaaaaggcatgctcaccctgcgattaagacgcatctacacaacacaaacggatgctgagcagaaatgacccagaggcaccatcgtcttttcaagcagtttatttccattttcagttctaatgttgactttttcataaatattcacctggaatctccactaaggctcctcatgagcagggcccaattcctagaatgtgcttggtgagttagcccctggtatacagtagaggctcggcaaatattctacagcctcctttctaatgatttcccagtggccagcgtttcccaacatgtgagatgtacagttcaaaaggccacagggaaactgacacagcagggccatttcaaaaggggaggatcttccaattcttctgattttaggaaattctgttgcgtgctaaccttgaacacatgctagcctccctttctcagatttggaaagatctaaagtaatagttatttctctaaaatgaaacatatatttcattttatatatatatatatatattacagataccttctatctatggcaatttatgttggattattccacctatggcaatcacatcaagttttctttcctttttttttaagagatggggtcttgctatgttgtccaggttggtcttgaactcctgggcttaagctatcctctcaccacggcctcccgaagtgctgggattataggtatgcatcaccgtgcctggccaaattctctttgtaaatacatttgagtggtagtaactaattttaaaggaaaaaaacctgaagtaatctagaggtggaacacaaatgaggtaaaatattagagaactgattcagcaaggactaaagattgggacgcaatgccctctgcacagtctggttcttgaggttgcggtgggtgtgtttccagtggcgtaggtcggtcagatacttctggcctttgggagtgcgtggatgtgacgcggtcagtgccacatgtgaaccaggtgctgcgaagtcctgtgaaagtcacacaccatatggtgcactacaaaggtataggttaaaggctgaagcttgaaacatacaaaaaaaaatcctctatagagcaagatatattcctagtattcagctgttcccaaccaaataaaaaaaaaaattaaggaaaaaaataaaaaaggaagcattccatcagtggctgtattgaacaagtaatgtatcatcaagatataatcacccaacctttattattccaagtgcactactgtcaagagacatgttacagccgctaaggacaatgtacttcagctttgaaacctgggcaagaagccacacgactgcatgagacaagccgtgagaggcactgctcaggaggaaacgctgggtctcttcaccaaaattagattacagcatattctgggagcacacgcccttgtactgcttacaaaccaagggagaaagaccaacgcatccatcatcccaacgccttccctggaacagggaaatgagcatcattctgtgggaacagcgtctttagactctgcatcagtttgttccacttcagcatccgcggcagctggggcaggagcaactctggtttgggcactttctgcctctgctgccattgtctcggcgccatttccagcctctgcagcctcacttctggccttggggacgcccttctcatgtgccgttccacagggcacctgctcttccagcagctgttcggcttgaggatcactaccggcctccgctgtgtccgtggggccttcgtcctcagccggctccccgctgctctctggagcgggcgctccttccccatctacggccctcactgctgctgtaatcacctctgctaagacgtccgcggccacctcctcaggtgtctctttcttatcctcacctcctaaattgtcatctccttccatttctggatcaacagtttcactggtgaaagggtcctcaccctggccaaagaggaaacaccggtcagcgtggtgtaagcagagctcaggaggcccatgattgcggggatgtcagcttttcagaaccagcagtccacaagggaaacacttctgtaaattatgccacaggagtgaatcctacatgttctcagagcctacagattcagaaaacacctcggggagatattctgcaattttttttttttttgagatggagtctcgctgttgcccaggctggactgcagtggtgcgatctcggctcactgcaacctccgcctcctgtgtttttagtagagatggggtttccacccacctcagcctcccaaagcgctgcgattacaggtgtgaaccaccatgcccggcccattctgcaatttttttttttttgagacggagttttgctttgttgcccaggatggagtgcaatggcgcgatctcagctcaccacaacctctgcctcctggtttcaagtgattctcctgcctcagcctcctgagtagctgggattacaggcaggagccaccacgcccggctaattttgtatttttagtggagacggggtttcaccatgttgggcagactggtctggaactccagacctcaggtgatccgcctgccttggcctcccaaaatgctgggattacaggcacgagccaccgtgcctggcctgcaatttttaatcaagcatgtaccagcgaggaaaagttcacaagcccagccttaacttgatgttttttaaaaaagggcatgaggccgggcgtgatggctcacacctgtaatcccagcactttgggaggccaagatgggtggatcacgaggtcaggagatggacaccatcctggctaacacagtgaaaccccatctctactaaaaatacaaaaaaaaaaattagccgggcatggtggcgagcgcctgtagtcccagctactcgggaggctgaggcagcagaatggcgtgaacctgggaggcggagcttgcagtaagtcgagatcacgccactgaactccagcctggcagcctgggcgacagagtcagactccatctcaaaaaaataaaataaaataaaataaagggcatgtaataggaagttaacactacgtaatattttagtttcattaaggtacagtggctcacgcctgtaatcccagcactttgggaggctggggctggaggactgccggagctcaggagttcgagaccagcctgggcaacgtggcgaatcaagattcaaatccaagtctgactccctcagaagtcaaaattctcctaagtatatgatagaaaactatctgtagtctaaaacaagcaaactaaaagttatcattaccagattaggaaacatgttttaaaatatgatgcttagggcaaggtgctcacgcctgtaaccccagcaatttgggaggtcaaggcgggaggatcacttgaggccagaccagcatgggcaacagagcaagactgtcttaaaaaattagccagcatgtggccgggtgcagtggctcacgtctgtaattccaacactttgggaggcggaagcaggcagatcacaaggtcaggagatggagaccatcctggctaacacagtgaaaccccatctctcttttctttttttgagacggagtcttggtctgtcgccaaggctggagtgcaatggcgcgatcttggctcactgcaacctgcacctcccggattcaagcaattcactgcctcagcctcccaagtagctgggattacaggtgcccgccaccacgcctggctaattttttttttatttttagtagagatggggtttcaccatcttggccaggctggtcttgaactcctgacctcgtgatgcacccgcctcggcctcccaaagtgctgggattacaggcgtgagccaccacgcccggccaccccatccccctgcaaaacattagccaggcatggtggtgggcgcctgtagtcccaggtactcaggaggctgaggcaggagaacggcatgaacccaggacacagagcttgcagtgagccgggatcgcaccactgcactccagcctgggtgacagagcaagactccatctcaaaaaaaaaaaaaaaaaaaaaaaaaaaaaattagccaggtgtggtggtgtactattgcagtcccagctacctggcaggctgagtggggaggatctcttgagctcaggaattcgaggctgcagagaatctctgcaggaatctcttggctgggtaccaagagaacaagaccctgactcaaaaaaaaagacgcttagaagcctgagctcacacttgactctggaaacttttaccttgcttaagctgcaaaggtaaaatatacatcagtcatgtttcctccctctttttttttttttttttttttttgagacaaggtctcactctgccatccaggctggagtgcagtggcacgatcttggctcactgcaacctccgcctcctgagtagctgggaccacaggcgcatgccaccacgcctggctaatttatgtattttttgtacagacagggtttcaccatgttgtccgggctggtcttgaactcctgaactcaaagtgatccgcccaccccagcctcccaaagtactgggattacaggtgtgagccaccacgcccggcccagtcatgtttcttcaattggttatttagattctgtgcctttaatagatggaactgtcaaatatggaagtgtttagtaactgagaggagggcaaaggtcctgaagtcaggttgtgggctgggacttagccacctgccccaaatgctaaagtcctgggatgaacactgagcaaaatgggtttcacaaggaagaactgggagctcttccaaccagccttctctccatgagcacccactttgggacttcgatatgctgctcccatcatgaaggctctggttcttcactacccctcaccttcaacctcactgtcagttggctctatcaatgaaatctctttttagcttctctcctggaaaattctcatgtaccttggattctttttttttttttgaaatggggtctcactctgtcacctgggctggagtgtagtggcgcaatcgttaactcctctaactcctgagctcagggatcctcctgcctcagcctcccaaactattggcattacaggcatgagccataattcccggttccccgctttcctttattttcaagaccagtcttgctatgttacccaggctgaagtgcagtggtaacaccatcactcactgtagcctcaaattcctgggctcaagcaatcctcccatcccagcttcccgagtagggctagccttgggtttttcttaaaaaatcacctaaccatcatttgctcagaattttaaggctaaacaatcaggatttttcatggtaaaaatccattacgcactgattaatcaagcagcgccacatccccagagtccccaggcaagcactgactcattagaaatcccagttgtcatgttcctgagcttgatgcattccagtgtccctcaactgtcaaaagactcagaaatgctaaatgctgcactctggattcaactccctgctcctggggttcatcttcccttttgaaagcttttcctgtctgtggtacttgcaagcacaaaccttgaggtatttttccagcatcttcactatatgtctgttgttcaaaacactcttagccacatggagactggttttcttgaactgttcagcagccaactgcaaagggaaccaaatgtgagctcttaaaaatggcaaagattaaggaagagaataaaccagccaggctctgccgagtcatcctgagatcagccctatgcagagaagcgaatctcaaaacgccagcctccaagaatagaaggctccagagactgtgcaaccaagactaacaaactggaaaagctaggcaatcttaagagataaatgcaaagatgcaccactgatacccatgtagcacatgcagaattgggggtgaaacaagagcatttacaaatgaaaggctgtgtggactcagtggaggaaaaggacaagctctttcttttcagtttttggggttacattgatttcataagttcaacaacaaaagtatgaatatgctgggtgtggcagctcatgcctgtaatcctagcacgttgggaggctgaggcatgtggatcacttgaggccaggagttcgagacaagcctggccatcatggtgaaaccctgtctacaaaatataaaaattagctgggtgtggtggtgcacacccgtaatcccagctactcaggagactgaggcatgagaatttgggagatggaggttgcaatcagctgagattgtaccactgcattccagcctgggcaatggagtgagactctgtctcaaaaaataaaattaaaaacaaaaacaaaaacaaaaaacaaacacacaaccatgactgcaccaagtctctgttttagagcctgacttgtttgcacaatggtcccttgtttgtatactgcttttcagctgatctttaacagtactggggctgggtgcagtggctcacacctgtaatcccagcactctgggaggctgaggcgggtggatcacctgaggtcaggagttcaagaccagcctggccaacatggtgaaaccccgtctctattaaaaatacaaaaaattagccgggcattgtggtgggcgcctgtaatcccagctacttaggaggctgaggctggagaattgcttgaacctgggaggcagaagttgcagtgaactgagatcgtgccactgcactccagcctgggcaacaagagtgaaactccgtaaaaaaaaaacaaaaaaacaaaaacgtaaaccaaaaaaccaaaaccaaaaccaaaaccaaaacacagtactgtgagatgggtgagcagctcttgacctccccatttaatagctgagtaaactaaggagagagctgctaacccagggccagaaagtgacaggctgcagagcaaacgcagccacaggcactcttcactgtctgcttttctgcactgacagcaggtagagctgttgctggatagggcctctatggtctgcaatgctaaaaatactcatgatctgactctttacaaaataaggtatttttccagcatcttcaacacttgacccctgggctcaacatttagcctgaagccccagcagctaggtaaggacagaaccagtcctttagtccaagtcccctgggccactcagctttcaatggcccttcggtctcagcttatggaagcccccaggccttccgctagtgggaaaactgaccaacgtggaaacactatcaggagaatctcagctactgcatttaatcgagtctaagcaacacattttctcacatttttataaaaattgagacgaatcttacgacccatcgatggaagtgatagacttgaaacatagcaagaacccctaaagatgttgttattccccataagacacagcaggctctgagccgcagccctgcaatgagcaccccaggcagtgtggggaggaagactcaccctgcggttgtgattgtggtccacggagtgcaggtgccgctggaggagctgcggctgtgcaggaattagcatgtcgcaggccaggcagtgagcagcctcgatcttcttgaagaagtgctcctggccaatccctgccaggaaacgcatgtcttgtaggatctgggacagcaagtgatgctttcctcctactccccatctgggcccacgttttctccctgcaactctaaggaatcagaagggcacagcctgcctttctatggggagtatgggtcagcacatcggcctctatagctgtgaattctgcacttttcagcttttctgttcctcctggttgtttcttttcaaaccaaggaggaaaagatatgaaagtgcttaatgtcactgatataagctgcaatctatgcaaggccacatccgaaggtttctttccattgctgctgagcgctcttcccacgggtctcgtcatcaccttctcagccaacttgggctggcttcatgccactttttttttttttttttttgagacagagtcttgctctgtcgcctaggctggagtgcagtggtgcaatcttggctcactgcaagctctgactcccaggttgacaccattctcctgcctcagcctcccaagtagctgggactacaggtgcccgccaccacgcccggctaattttttgtatttttttagtagagacggggtttcaccgtgtcagacaggatggccttgatctcctgacctcatgatccgcctgcctcagcctcccaaagtgctgggattacaggtgtgagccaccgtgcccggcctcgtgccacgttttacgggtcctgtcacatgccttactaccatccaggaaagcactcatcctgggatgacaactcacctttgaaaggatctggttttggttttgcggtttctttctccatcaattcctgacgccgcttctcaattttcttatttctgtttacaatgtattcctaggtgggattggagagggcataaagtaaaatgagaggtgggcgcatgtgggcatttctcaactgccagggctaggcaggcagctatcagagcagctgcgtggggcagcacagcacgatggctggagctcccggttgtccctgtgactcagggacttacacagctactctatctgggaaaggaaaccttggccaagtatagcctctgatttcccttcctccttcaagggatccggcacctgcgggatgggcaagagacgcggtgacggggcccaggtttcctttacctggaggaactccacggtcttgtcgggcagcttggtgcttatgaaccgcagggtctctttgtgaaatttgctttgcagatgcttctggatctcttcgtcatcaaagctacggaacttgcatacagaacaggcaaactgaattctgtagaaggaaaacaaggaggggagtgaagcagggagcatcagcgagtgaagcagggggcatcagctcacctctgaggagagctgaaatagaaacaggattttcagctctccccctccccctctccctctccccacggtctccctctgatgccgagccgaagctggacggtactgctgccatctcggctcactgcaacctccctgcctgattctcctgcctcagcctgcctactgcctgcgattgcaggcgcgcgccgccacgcctgactggttttcgtatttttttggtggagacggggtttcgctgtgttggccgggctggtctccagctcctaaccgcgagtgatccgccagcctcggcctcccgaggtgccgggattgcagacggagtctcgttcactcagtgctcaatggtgcccaggctggagtgcagtggcgtgatctcggctcgctacaacctccacctcccagccgcctgccttggcctcccaaagtgccgagattgcagcctctgcccggccgccaccccgtctgggaagtgaggagcgtctccgcctggccgcccatcgtctgggatgtgaggagcccctctgcctggctgcccagtctggaaagtgaggagcgtctctgcccggccgccatcccatctaggaagtgaggagcgcctcttcccggccgccatcacatctgggaagtgaggagcgtctctgcccagccgcccattgtctgagatgtggggagcacctctgccctgccgccccgtccgggatgtgaggagcgtctctgcctggccgccctgtctgagaagtgaggagaccctctgcctggcaaccgccccgtctgagaagtgaggagcccctccgcccggcagccgccccgtctgagaagtaaggagcccctccgcccagcagccaccccgtctgggaagtgaggagcgtctccgcccggcagccaccttgtccgggagggaggtggggggatcagccccccgcccggccagccgccccgtctgggaggtgaggggcgcctctgcccagccgcccctactgggaagtgaggagaccctctgcccggccagccgctccgtccgggagggaggtgggggggggtcagccccccgcccggccagccgccccgtccgggaagtgaggggcgcctctgcccggccgcccctactgggaagtgaggagcccccctgcccggccagccgccccgtccgggagggaggtggggggggtcagccccccgcccggccagccgcaccgtccgggagggaggtgggggggtcagccccctcgcccagccagccgccccgtccaggaggtgaggggcgcctctgcccggccgcccctactgggaagtgaggagcccctctgcccagccaccaccctgtctgggaggtgtacccaacagctcattgagaacgggccatgatgacaatggcggttttgtggaatagaaaggcgggaaaggtggggaaaagattgagaaatcggatggttgctgtgtctgtgtagaaagaggtagacgtgggagacttttcattttgttctatactaagaaaaattcttctgccttgggatcctgttgatctgtgaccttacccccaaccctgtgctctctgaaacatgtgctgtgtccactcagggttaaatggattaagggcggtgcaagatgtgctttgttaaacagatgcttgaaggcagcatgccaagagtcgtcaccactccctaatctcaagtacccagggacacaaacactgccaaatctccctctgcgagaaacacccaagaatgatcaataaaaataaataaataaataaataaataaataaataaataaattggcagtgggcaaaaaaaaaaaaaaaaagaaacaggattttcagtaattttttttctttcctttttttttttttttttttggagatggagttttgctcttgttgccgaggctggagtgcaatggtgcgatctcagctaaccgcaacctctaacacccaggttcaagcgattctcctgcctcagcctcccgagtagctgggattacaggggcccgccaccaagcctggctaaatttttgtatttttattttattttatttatttatttttttgagacggagtctccctctgttgcccaggctggagtgcagtggtgcgatcttggctcactgcaacctccgcctcccaggttcaagtgattctcctgcgtcagcctcccgagtagctgggattacaggcgcccaccaccactcccagttaatttttgtattgtgagtagagacgtggtttcaccatggtggctaggttggtctcgaactcctgacctcgtgattgacccacctcagcctcccaaagtgctgggattaaaggcgtgagccaccgcgcccagcctattttttttttgtatttttagtagagacagggtttcaccatgttggctaggctggtctcgaactcctgacctcaggtgatccacctgccttagcctccccaaagtgctgggattacaggcgtgagccaccgcacccagacttttctttttctcgagatgagatttcactgtattgctcaggctgttctcaaactcctgggctcaagcgatcctcccacctcagcctcccaagtagctgggattagaggtgcatgccaccgcactcagccagggaaagtggctgctgaaccaagagttccgacttcccaaagggcaacagaatggcagttacccaaacttccccagctgaagaatgggaacacaggcttgcaggtatctcaggaaaatgactcgcatagtaatctgctggcactgcagcccctctggccccaaagcccctgagaaaacaccagaaagctgcaactgcttggaactggggacgccctaggctctggctggcagctcttggggcccagcatctagcttcacagcttctcagatgagttcctctctgcaggaactgggatgacataaggcaacctcattttacgtgcagacaaaacacctcgcacaattcaaaacacaaaacccagtatcagttctgccatgagactacacgtaaagacatgtcacatcaaattctacagataaaaagtgaggcttctttgtcacaggctttcaaagtctccccaaatgcaaccacgctgcatggcaagggagagcagcctgcaggcccccaggccaccacactggggtgctccctccctggctctctcctggaggctcctgccccttctggtgtaggggtgcaggccctgtggcactcaggacttcacctctgccaactccacatgcctggcttctgacctctgacaagcaacatgaagacacctccgcttctgcagacagcccctacgtaggcggggaggggacaatctcccggggctcatacacagcactgtcaggaagctactgatgagctgtgtgcttccctgctacacctctgcctccccgtgagaattcctccaagtcccttcgagatcctcagtcatggccaggcgcggtggttcatgcctgtactcccagcactttgggagaccaaggtgcgtggatcacctgaggtcaggagtttgagaccagtctggccaacatggtgaaaccccgtcactactaaaagtacaaaaattagctgggtgtggtggcgggcgcctgtaattccagctacttgggaggcggaggtaggaggatcacttgagcccaggaggtggactgttgcagtgagctgagatcgtgccactgcactctaggatgggtgacacagcaagactccatctcaaaggataaaaaaaaaaaaaaagaaaaagatcctcagtcactagcgcacactctgaaggtttctttttttttttttaaaaaaagtcacctgttcattggaagaacatacaagatgaaaaaaaagcaaaaagaaaaaaaaaaaaagcaaaaagtagtaaaaaaaaaatgtcatctctatacccttctcccagtactctgggaggccaacgcaggaagatctcttgaggctagttcaacagcccaagcaacagagaaagacccctatctctttattagattatttaagtttaaaaataattaaaaagaaaatgtcatctcagtttccatgtgacatgaaaagtcatctactctatccatttatctgtttaaaataacaagggtttcaatgttcctgtaccacttaagaagaaacagttctgcgtttggttcctggcttcgttttgctaagcatttctctcttttttttttgaatccttgatttaaggttcacatggaacagtgattttctttttttttttttgttcctgagatggagtcttgctccgtcgcccacgctggagtgcagtagcacaatctcggctcactgagatggagtttttatttgagatagagtttcgctcttgttgcccaggctggaatgcagtggtgtgatcttggctcactgcaacctccacctcctgggttcaagcaattctcctgcctcagcctcccgagcagcggggaatacaggcatgcgccaccatgccggacgaattttgtatttttagtagagactgggtttctccatgttggtcaggctggtctcgaactcccaacctcaggtgatccgcctgccttggcctcccaaagtggtgggattacaggcgtgagccactgcccccagcccgtttctttttctttttgagacagagtcttgctctgtcgcccaggctggagtgcagtggtgcaaccttggctcactacaaagtccacctccccagtttaagtgattctcctgcctcagcctcccgagtagctgagattacaggcacctgccaccatgcctggctaatttttgtaattttagtagagatgggtttcaccatattgaccaggctggtcttgaactcccggcctcaagcgatccgccagctcagccttccaaagtgctggaattacatgtgtgagccacggcatctggccccttttactaagcatttctttgaacacgacaatcactgcccagactgggcgcagtggctcacgcttgtaataccagcactttgggaggccaaggcgggcagatcacaagatcaggagtttaagaccagccttgccaacacggtgaatcccgacctctactaaaaatacaaaaattagccaggcgtggtgtcaggcgcctgtaatcccagctactcgggaggctgaggcaggagaaccgcttgaacctaggaggcagaggttatagtgagccgagattatgctattgcactccagcctgggcgacagagcaagactccatctcagaaacaaacaaacaaaaagaaaatcactgtcccatgtgaaccttaaggtcaaggattccccagcatcacatgatcactggtgatttcagtttctagtcagaagccacttaactcctggcagggagaggcaggcacatggtgtgctcacaatgacatcctttgggctcaacatttttgcaatccttttctattgtgggacaaaatcttgatggtaggatcatctctctacctgtctcctagctgtgtcaaactccaggggtggtctggatttggataaggtgaacacaggacagtgtctgagatgccagacaccaggctagggggcagggatgcccctcaggcctgcaggagagtaacagagcccgctgctgagcagttatggaccacacagacccaccagcaaggctgggattccagaggaatagagacacaggagtcaaacaccaatcctctaaagcaagaacagaaacctaaccaccaaagcaacgtcccagccatcctagaagacaggtagctcgtgtgctgggagcacgagtgatggtcttttctgcactcccaattgtttactgttttgcctcccactggtttggccagaggagtcaggccaccaggcccccagcattgtggagcgaggacaggtgagctcggcagcgcctccaccgcacgagtccacctcctcctgtggggtcgtgtgcccgcgcctcacctgtcggctgcacggtcccgcgtcctgtctcttctcctttgcttttcccttctcttcttcacatcctcgtcctcgtcctccttctctcctgtaacagacaagtcccttcgagacgctctgagtggcctgcaaaggagctgagctccagggcctggtcggggggctgcagcttggccaccgcaccctgtgccctgccactgcctgcaccacgcggcagggtccaggatgccccaaggcactgtcagagactcctggtggacacgggcctggagtgagagcccggagtagtcaccaaactccccacatggcctgaggcggccaggatgggctagggacacagcctgcccaccccatgtgcaccacagccccctgctccctctgtcctccccattctgcttgtccaatctcatgccctgcgatggggtcttctcccaatatcacaggagaagccaattctccccggatgaagaggcggcagctgaaggcctcaggaagtgaagcagctgctccgccgccctctatcccacctctaggtggactgtgacgagcgtcctggcggccccgtctgaactagggcctcagcaggtctgacagtccttgctggcccgacctctatcttccactcacaaaaaccgtcaatctagggctttcccagggctgcgtgggaagcaatcctagaaaaaaatttgggaagagaccaattggtcctcccgtccgtcccccggggccagcagaggagctcctcggagagccacgcggccatcatcccagcatgaggccagggacggacgctgaaaaaaggttggagaagcatctgaactgtaacccctacccctgatgccagtcccgagactgtcccacgaagatggcgaccggcgtgcgctgctcagaagcctctcaaaagggcgtgtgggatttttggcaagaggtcactgcctgaaactatgactgctgtttaatagcaaagtcatcccgggtaggtagcaggacctgcgcgcaacagacatgtcacctttgctttagcattgtgccgctaagcgctcggggcgccccgtgctatggacaggactgctgcgggtcgcgggggggaggaccgcagagggctggcaaagcctgaacaggaggaacatctaagccaagggccttcagaatggatgggagcagggccactgaggagccagcctatgatccttggggtaaccagctacggaaagacccacaggacaggtaaagaaacgagtggcttcagggtgagctccaggccgcggcacctcaggccgctctgccatgagggatttaagcctgctctgctgttgctgcagaccctctggtctcctgcattggacatgaagagacctgctgaagggcgcccgcctctcaaagacccagtgggcctgggtgctcccgaccccgcaggtgtctgctgtcacacactcgcaggcacgaagcaatgtgcagtgcagctgccagtatccccaccacagaggcccacagcacagcccagggcaggcgactgaaggaactggacaaaaggaagccccagagaaaacacttcagggaaatgcactggccgaggagggcacagaagatgggctgggggcctcttctctcatgtttctccttccctacaaacttcgactgtggtggacacccaaggctgccccccatccccactgcagcccacatcgggtcaggcagacagacccgtttccagtaaatgctgccccagacactttgaagcaaagtgttggctgatcgccacggtcaaggcccatctggtggctgcagcccctcttcccccacagccacgggcccctccatccaggcccctggcttgctcagaagctgggcagtaagtgcggggcagctgggaagacacaggaaagctgcaagggacacggtgatgcctacctctttgcctcccagagtcgcagagttcatcctcctggaaaagagtatacacaaagtccggcagtgagctggtgtgtccagactctccacaaccagcccagtccctggccactgcctggtgggcagtctcacccaagacctaggttgctatgccaccaagaatgagccacagtgtgttaggaccagcctccggggctcaggacagggcctgtgtgtcctgttattactcctagttgccttcagagattctgtgacaatcaccttgctaaaaagccattcacccaccctctctcggttcctcctaagctgcagaactgcctgccccatgacaaagacccacccgtacaattctatgaatggagcctgttcaccaaccgtagggagatagagtctcacttgggggatgccagttctggcattcttcatagaaaatgggttccaccacgtttcccgagcttttgtttatatttacccaatgtcttttttttttttttttttttttttgagacggagtctcgccctgtctcccaggctggagtgcaatgatgcaatctcagctcactgcaacctctgcttcctgggttgaagcaaatcctctgcctcagcctcccgagtagctgggactataggcgcatgccgccacatccagctaatttttgtattttcagtagagacggggtttcaccatattggccaggatggtctcaatcttgtgacctcgtgatccacccgccttggcctcccaaagtgctgggattacaggtgtgagccaccgcgccaggcctatatttacccgatgtcttaataacaatcacgtatagataaaaacgattcaactgagaatctgaacagagctgactccttaggcagtgaacatacggctaaattaacaatcagcaggtttacagagattcctaatctcaagaccagcaaaatagggatcaagtgagactctgaaaacctgaaaagccaccatctcctgcctgttccctgcctgtgtgactctaaggacttggggaaggccctccttcccactctggacctccaggccctacacctccaacttggatcagaatctacactggggtggctgaggcacctccccaagagcttggggtggtcccggctatgaactggccccacgtgctgcctgcctgtgccttgttgtgaggatggaaggatgaggacaccagtcagcggcacccggcacggagctggcggcaaatgagcctccagcctgtgcttggaggcttcagcccacagtccctgcacttactggcctagagaccagggagaggaactgggagcttttttcagaaaaggaatgtttgttgtaagttgaaaactttttttttttttttgagacggagtctccctctgtcgcccaggctggggtgcagtgatgcaacgtcagctcactgcaacctccacctcccaggttcaagtgatcctcctccctcagcctcccaagtagctgctactacaggcaagtgccaccactcctggctaatttttgtatttttaatcgagacggggtttcaccatgttggccaggctggtctccaactctcgacctcaagtgatccacccacctgagcctccctaagtgctaggattacaggtgtgagccaccgtgccggctaaggtggaaaacttttagaaatctagctaaaagtcagggtcctgaatccactcagaggtagtcaaatctaccatggcagctgctcctgcccctttgtgaggaagggtgattaaagaaagaagaaatcccacactagaggcaaaagggctgcctggtggacttacacccttgaattcttcatctcctgagcggaagtcaccagctgcgtcatctgccagacacaaagaaaggaaaagtcagtccccggagaacggtcccatccggtttccgccctcccaagctcgccatccagggtgagtctgccctgaccacagtggggttgaaacatgccacctgcgagtgtccacgacacagatggggcaagcagagcccccagcaggcagccgacccatcctacatctgtctggcccacctggcccccaggacataccattttcggagaaatctccttcactgtcaacccgggccagtttggtgtctggctcctcgtaaagttggaactgcttccgtttcctgcccgtgccatctggtccgaagcggtcaaaccctctcctcttgggctacagacaacaagcacaccccatgagctacttacgagggccatgaagatgccccacagaaaagaacaaggaggttgtaggatcagacaacacaggcacaaaaggtcttttcaaaaagcaaagagacaacataatttgaaactaaaaagaaaatcatgctgagtgaaaagaagccaggaacaaaaggccacacgtttcgcgactccatttgtgcaaaatgtctagaacacacaaatccagagaccagtggtggttgtcgggggctggtgggggcggggaagagacaggggtgactaatgagaagaagtttctcttctggttgacataaatgctaagattagactgtgatggtggggatggttgcacaatcctgtaaattaactaaaagtcgaactgcgcacttaaaaacatttaagtgaatgttgagatggggaaattttacctcaataaagctgctaaaaagagaagcgaaggcggccggaaggaaccttgcgagggcttacccgatcccgatcccgcatccgaggctgcgagcggccacatccgtagggcatggtgctgtcatagccgcccgccccctgcatgcccatcacgccgtagtcgggagccatggactgggagaagagggacggaggtggccggctgggggagggccctcccaggccccgtccacccacgtagttcagctcgttccagggcgtggacaggggctcagaggacgcagcggggggcacgaaggggtcgctgcgcatgaaggtgccagggttgctccggtcctggaagcggccctggccccggccccgcatgaagccatcaagggagccccgctcccgggctgggtctcggcattcactgtactgccccccaaagctgccattgcggtcggaccccaggtcgaactcatagtcgtagctgtagctggggcggtaggggttgtgctccggcaggcagggcctggagtcataggactcgaacggctggaagcggaaggagctgcaacagaagcacagcccatcaggggcggtcaccccgatcacccactgccacactccctcagtataacctcgacgcccctacattcaaaacagcaaaccaaaccaccctgcatcccacctaagtgctgggatgaccaaaactgaccaacaccctccctggaacactgctgagcaggggacagagcccctggccacaggaatagcatgatgtagaaaaaaggagtctcggggagcttagccaacaaccacgcccaagccccgccatgaagaaaagcaaggaagtcctactgtaacatcactgaccccccacgagcccaactcgtcaatgccacacccaagagggaggcggggacaggccctccctcaagagtgggtgcccactcccatgcgcacaaaggtggggatgtgtggggtcccgggggagggcttgggtccataatcacctctcccggtcctgtatgccctccccaccgccgccgctcccgcccctgcctccttccttggacatcatgtccaaacgctggttgatcttggcaatgagggagtcggaattgtcggtgcatggctctgggccgtaagaggccatgtgcatggcaggggccccggccgccaggccgccatcattggccttggcggcctcccacgaggctgggccgtagctgtaggttgcgcctgtggtgacactggtgttctgggcgccatagtaattgtagttttcataacctgtcacagggggaggagccaagtcagacttcagcagccacgaggcctgtccatggtggacacaaccggggaggggcacccgctgccacggagaaggaaaacgggtgtgggacccagtgctgctggcatcacttcacactgcactgtgacctgccaagaggcagcaggaggtggccagagaaaggggcagcctcagtgccgagcggcgggttttccatgccagacgctaggacctgttccccattcaaagccgggtgactgagagcctgggaacagcagttccggctgctgacaggccccacaaaggaccgctgctcccaaagcacggtcgcagtcctccccatcatgctcccctgaggccgcccaccacagccctctgcagtccccccatatacacaacagcagccgtggctgactgcgtcctcaggaacagagccagaaagtccacgccagacctccctgacgggctgacccgcctggccttcagatcagaggcccacttgcccgcccacagaccccccccacagaagggcttaccttgccagctggccacaccagttccatatgcaccttaggggaaacagaaacacacaagagccctgtttgcagaacgaaggcactgacaccccagctgtcaccttgctccaccctccacagccccagggccagggcttccctccgcagcgctcagggagacacccttgggtgtttttagctcactcaactcctacagagcactaggctgagaggctgagcacaagcaagccctctatcccgggcaaggccaaccgtccgtcagggcaagggaagggacgccgcacgctccccaggaagctcgtccactgtgggctgctggccaagaggttggccaggccaggccccaggcagagacctcgtaaagggtcagttcccatcagaagccagagtgcaggcgctgccaactgcacagcgaagcattggtgcaaagtcacgtcctcaactcaagcgaaaaagaggacgttatgtgccacgagcgacttggaaggcctcctcctgaaacaccgggtggtggctcaaaagcagccccactccccatgttgcctgagtcagatctcaggctcagaaaacaaaggaagccctcgtgccctaaaacacgggctggcagaaaggagaaagcctcgccagcagagagcatgcactggttcgccacacaagcctagcatcatggccctgactctaaagcagggatctgcaaaaagtccagccacacccagcccacttcccgccttggcacagcccttaggattttcgaatttcggtgcccataaataagtaccagcacactgcccgtagccctgtgctctcaggctctgccctcagctaaggatgaattttacgtttttaaatggttggggtaaagtttctaaagtgtattcaatgacaaattttgacatgagatacatcacttacacactggatcaaaactcagagaactatacaaattaacaaaaactatgagctatagtgaataatatcacatcaacattgcctgattaattgtaacaaatgcatcacaccaatgcaagattttttttttgttttttttttttgagatggagtctcgctctgttgcatgggctgaagtgcagtggcgcgatctcggctcactgcaagctccacctcctgggttcacgccattctcctgtctcagcctccggagtagctgggactacaggcgcccgccaccgcgcccggctaattttttttgtatttttagtagagacggggtttcactgtgttagccaggatggtctcgatctcctgacctcgtgatctgcccgcctcggcctcccaaaatgctgggattacaggcgtgagccaccgtgcctggcctttttttttttgagacagggtcgtgctctgtcacccaggctggagtacagtggcataatcacagctcactgcagccttacctcctgggctcaagcaatcttcctatctcagccttctgagtggccgggactacaggcacgcactgccacgccccactaatttttcattagttggataaaaggatcacttgagctcgggtctcgaactcccaggctcaagtgagcctcttgcctcagcctcccaaagtgctgggattgcaggcgtgtgctgcctcgcccagctaatgaaagatcttactaatgaggccaggcgtggtggctcacgcctgtaatcccagcactttgattatgggattgattatgaggtcaggagttcgagaccagcttggccaacatggtaaaaccctgtctctactaaaaatacaaaaattagctgggcgcagtggtgggtgcctgtaatcccagctactcgggaggctgcggctgcagtaagccgagatcacaccactgcactccagcctgggcaacagagcaagactctgtatcaaaagaaaaaaaaatcatactaatgagatttttagtacactcactacaggtgtagtgtacactcagtacacctgagtggaggtgggtgggcgtatgaaactccactactcaatctaaagctgtactaaaaagtctggtaattatagagaaaaaacacctcggatataccctcagctatttactcagaataacaaaaatattttgccaaaatagagtattcactaacacgcaaaaattaggaacttcaaattgtattgtctgtaagtaactactggcattgtcccatccactctttcacacatttatgactgctttcctgctacagagactgtggagcccataaagccacaaagatattcactatctgatcttttacacaaagtttgctgacccctgggctactactctcccttgacccaagttcagctctgccatgctagggccttgagttaggggaagcccacgcctcacccgcaaagcagagcccacttaccctgggtgttggcaggtccagcactccacgccccgtagcctgcaagaagaccccgtgagttaaaattctatttgtcacaccagagaacgggtccttttgggggtactcctaaagggatctccttacagttcagtgccagccttagaagaaggaagactcccccccaccccaccaaaaaaaagccatcacacaactggctaatggcgtcatcgcattccacctggctgagatcaaagcagaaaaagaagggtgggaagtgggcttggaagtcagctccgccctgcagagggaccttggccaaggacctcacctctccaagatttcatccacaactgaggctaacacaagacaatccactcagcatgaggacacgttcccccacccaccacacagctaggaaaccagttcagagtgccatcacaagtacttcgtaactgaaaacaagcatgggaatttagtgacataaattgcatctttctaagctgcacttcctgccactttttgtttttttgaggcggggtcttgctctgttgcccaggttagagcgcagtgccgcgatctcggctcactgcaagctccgcctcctgggttcacgccattctcctgcctcagcctcccgagtagctgggactacaggcgcctgccaccacgcccgcctaattttttgtgtttttagtagagacggggtttcaccatgttagccaggatggtctcgatctcctgacctcgtgatccgccagcctcggcctcccaaagtgctgggattacaggcgtgagtcaccgcgccaggcccttcctgccacttttaaggcctccacggatcccctggacctttaagtcccagagccttcgcctggccctaaggcatcagacagcactcttcacccctccacaccccccgcccactatggcatctgtctggtccctccaggaaggagaatgggaactgtgttctctttatttctgtgtccctggggcccagcactgagctgcgcgcgggtggccaccatgcctgttaaatgacttcactttgatgaggcaggaacatatccatgtctccctcaccagaacaactcccccgcccccggctaagtgcctagtgcgtgccgatacaccgcaagcacccagcaaaccctgttgtccggaatgccattcagagacaagggagctaggctcatgggttacgagacttgacccagtcatactgctgagttttgccctctgctatgctacgccttcccctccgtcataccgcaaaaccttctaaattcgcatccgtgcagcagaaaggcagactgcagattccaacagcaagtaaccaacctcgagagactgcttctctgtgaagctctagtgtaagtggcacgcactattaaccttaaaacgctcccggaaacacaagaaatcagggaagcttaactatctccagtgtgtctgaaaggttttcggcaggtaggaagagggggtaaaaaaaacctctccaaactaagaatgaaaagaaggaatacaatacctgcagaaaagatctgatgggaaagaagggaaagaatggtgaaatctacccaggctgcggaagaccaggagagccaggctgagccttcgctaggacccggaagacaccaaagcacaccgcgcacgctgccgcctcaggaccgaaacctctctctgcaatttctggtgctgggatacttttgccctgccacttctcaagatcgacaacttctcgagctcctgcagccaggatcagaccactagcttctctacaaccagtcgagctccacccagcatgtcccaactatcccctgtgggcaaactttgctcccaaaaggctctgattccagaagcagggagcaggcagctcgagaagatcggccctactgcaggccaagcgctaaatcctagtggggaaaggacacgttccctcctgcacagcccctcggcccctccaggccaccacaacagactgcctaaaggagaactgccaatgtcaccagccccagggcacatcaggtttccagctttatacgaacactcagcatctgcccctcaccatcctgtcccaagccagcacgcgccgggtacagagctggagcccggcgaggctgactctcgcgccggcagcactcggccccaccgcgctgcaccggggactaaaggcccgaccccgcgcagcccgacggcttccgggacaggcgccctgggccacgtgagcccagcggagaccctacacggccccgcgggcctagggcaggtcgggagagaggcggcccccgcggtccgcccgcggccccagacccagctccccgggtccgacctcacaaccccacgctgtagctccgcccccctagcgccgccattttgtggcgtcttcggaagaggaagccgggagtgcaaaccccggggtcgctgggggccggaaggactccgccgaaggtgaggggcaaaaacggcccacactgtctaagacgcccccacgaagcccaccgcggcgtctgccccaaccccgagtcccgcccgcctcctcggggcctggcggccaatccgcacgcagagccccgggagcgacggcgccaaagcccaatgagcggcgcgcgcgcgccctggccgcctctccggagggcccagctggggcaaccacgctcgggacgaaggcccggccggcggcagtctgcgcagcggctgcgtcgcccgcacagagccttccctccccgctccgcacccagcagccaacacaaacctccgtagccctggtccatgtcttcgacgcggcccaccagcagccccgtttactaggcgaccacagcacgcatgcgttcagcgcacctccgccatcgactactggaagaccaggcgcacacgtcactacttccgcgcgcccccattggctggtcttcacgagggcccgccctcgccgtcccagctggcctttcgggctgctacgatccagctccgtggcctaatgggagttgtggtcccaccgcggtgcccgacggcccggcccgcgcgcatgcgcaccccgcccctctgcccaccccgccccgcccgcgcggcacagtaacagagaaacccggaggtgggatgggaaaactttattaggtttggtttccagcttcggccacgcgggctccgcccgccccgagctcgggtcacggggcgcccccgccgccctcctcgtcgtcctccacgtcgaggcccgggatgccgcggatctggcgttgcagcgcccctcccagcaagggcacggcgccctcctcctcctcctctgggggcggcggcggtggcggcgacacggccccgggggctggctctgggggcacgggaggctgcgccggcacgccctctgcgccctccgagatccctgccgcttcgccctgcgccccctcgtccagggcaccgccctcagcctcctcctgctccttctcctcctcggggctgtcggtgaaagggttctcgccctgtggggaggggcgcggacactgaagggagggagcacaggcggggactaagctggggacagggcaggcccggaccagtgcctcaccttcaggtagcgctccagcttcttgctgatgagcttgttgttgagaatactgcgggccaccatgagggaggacttcttggactgctccatcatgagctgcgggcagggcagaaggagctggagaggctgctctgagtgccctacaagttgctgccccgaccctgccagcttagagggaccccaccccgcccctgcacccacgcacttccagccccaccaacggagggccactccacaagcatggaaccacaacctatctgatctttgttcaaattccctctccttccacaccacacttactgtaggtaaataaaaatacagatctatatatctctaactttacggctgtattacagaaatctgatttgcttacaaaaaagctataagcagtgaacaattaagaaactaagagccaaaggtgggtgcaacctgtaacaaggtgccaactaggctaataggcaaggagcactttggggccaacggggaagatataaaaacaggaacagatatttaatgaaacgtcttttttaacccacagaattccaagaatgaagaattattcccagtcatgcaagggtgaagagagtcttctctgctggtgggaggatcaactgtttccgtattttttggaaagcagtttgacacaatgtatgaaaagtaaaaatctgtctcattaatcccttcccagaacgtatcctaaatttaagaactggaaacatgcgtgcacactgattgtagtggtgaaaaatgggaaaacacctaaacgttcctcagtgcagaagaggttaaataaatcgtacattcaaaagaacatcatgcagcccttcaaatcgggctcatctctgcactggcataagaaaggtgtataatatagtactgtctgcagagcatgccagagccattttgtctggaaggatttccatcaatatgctgggccatctcatggtgggagtacaggcaaatctcactttgatcattataaaaaccataaggtaaaagaaggatatttttggtggggtgggagagcccattgagtccttcccactccatttacatgtttcagaaagccttctcacttgctgtttctactctctccatcttcatttttttttttccttagcacgttttctctactactggaggaaaatattaacagacatcatacatgctcacaataaactaaagatacacaattaggatactactatagaccgttcccccagtgactctcacttgccaacagtttatcctcctggttctagatgcccagataaccacaccataaattctcccaagtgaggcacatttatgttgcttccagatcttctccacaataacccagcaacactagaataaacttgtacacttccatgctggtgcttttcattctaaccaggtttggtttcaaagtgatagtgcccaattaactgcagaacatttgcaagtcatgcttcttccacctgtgttaaaacaatgacctggtcctcctgcctgcccatcagcactggatgttgtcactgttgggtatttttgctgtggataaaagacagaagaatctgtgctgctgcctcccacggcatttccctgcccaccggcgagtgagtgctctggtaagcacactggaacacccgcccacagtttataattttctaactattttctgatcttggttttcatttttcacatttaaattttttttttttttttttaagacagtctcgctctgtcgcccaggctggagtgcaggggctctcagttcactgcaacctccgcctcccaggtttaggcaattctcatgcctcagcctcctgagtagctaggactacgggcacgcaccaccacacccagctacttttttgtatttttagtagatacagggttttcctatgttgcccagactggtcttgagctcctgagctcaggacctccacccatctcggcttcccaaagtgctgtgattacaggcgtgagccaccacgcccagccaaattttctagaatttgatacagattgagtatcccttattcaaagtgcttatgaccagaagtctttcagattttgatttgcattatacttaccagttgagcatccctactccaaaaacccaaaatctgaaatgcttcaatgagcatttactttgtcatgtctgtgctgaaaaagtcagattttactgggcacagtgtctcgtgcctgtagtctcagctactctcatgaggctgatgcaggaggattgctcaagttcaggagttcaaggctatagtgtgcaatgatttcacttgcgaccagccactgcactccatcctgcacaacatggcaagactcaattcttttttcttaaagaaaaaggttttggatttcggagcatttcggattttcagatgacggatgaactcaatctgtatatgttatgaggtagagggtccaaaattttcttttccagaaatgtacaaaacacaccatttatttccctaccaaattggcatataggtctaccatcccttatctataaactggaaatccaaaaggctctagaaaacaagtcttcccccaaaattcatttggtggctaaatgtgaactgacattacatttttcatttatatgtaagtcatgtgaagaattatttgtgactcaactacaaggcgctttccccagatcctgttggagaggttagtgctaataccatattgtctttctttttattttattttagagataggagtctcactctgttgcccaggctgcactgccattgtgtgatcacggctcactgcagcctcaaactcctgggctcaagtgatcttcccatgctagcctcttgagtagctgggactataggcactcaccaccatgcttggctaattttttattttttgtagagacgagatctcactatggtcaggaactcctgggctcaagcaatcccacctaagcctcccaaagtgctgggattgcaggtgtgagccactgcccccagccttgcatattggttttctgaagctgaaaaattaattctgaggcttctggccctaaggtttcagataaaatatctgtactaactttaacaaattactaagtctgaaatatactgagatcttttgctagactctctattctggttccactgtttcattactgtgctaattatcactttttttgttttttaattgcagcagctttgtagtaagttttagtatttctgaaatcaatctctcagctattgttagactgaattttacaatgtaaaactttaaaataatttcatttcattcagtcctactccccgactgatatttttgactagaaatgtgctgtctatattaatttggagagaactggtttttgttttgtttcactattaaattgcctatttaagaacacagaacattcctccattcattaaggtctatttctttttttttttttttttttttttgagatggagtcttgctctgttgctcaggctgaaatgcagtggcatgatctcagctcactgcaacctccacctccaaggttcaagcaattctctgcttcagcctcccaagtagctgagattataggcacccaccaccccacccggctaattttttgtatttttagtagagacagggtttcaccatcttggccaggctggtcttgaactcctgacctagtgattcacctgcctccgcctcccaaagtgctgggattataggcgtgagccaccgtgcccggctaaggtcttatttcatatccttggagtatttgcagttcttaaaagatctcaagcctttcttcttccctccctgttttttttttttttgagacggagttttgctcttgttgcccaggctggagtgcaatggcgcgatcttggctcactgcaacctccgcctcccaggttcaagcgattctcctgcctcagccccctgagtagctgagattacaggcgcccaccaccacgcccagctaattttttgtattttagtagagacagggtttcattatgttggccaggctggtctcaaactcctgacctcaggcaatccacccgcctcagcctccccaaagtgctgggattacaggcatgagccaccatgcctggccctcaagtctttcttcttaaatctgtattcttagctatttcatacattgtgtggttattttaagtagttttttttccatttaaatttctaactggttaatactagaatagagaaacactacgactttttgtacgctattttgaatcccatccccttaccaaattctattaattctaagaacattttgctgggatcattcagcttttctaagagcataatcacattatttgcacataaagagagtttgcattataccaataatattgctagattttttgtttttgtttttgagacggagtctcgctttgtcgcccaggctggagtgcagtggcgcgatatcagctcactgcgagctccgcctcccaggttcatgccattctctttttttttttttttgagacggagtctcgctctgttgcccaggctggagtgcagtggcgggatctcggctcactgcaagctccgcctcccgagttcacgccattctcctgcctcagcctcccaagtagctgggactacaggcgcccaccaccacgcccggctaattttttgtgtttttagtagagacggggtttcaccgttttagccgggatggtctcgatctcctgacctcgtgatccgcccgcctcggcctcccaaagtgctgggactacaggcgtgagccaccgcgcccggcctttcatgccattctcttgcctcagcctcccgagtagctgggactacaggcgcccgccaccacgtctggctaattttttgtatttttagtagagatggggtttcaccgtgttagccaggatggtctcgatctcctgacctcgtgatccacccacctcggcctcccaaagtgctgggattacaggcatgagccaccgcgcccggcaactgttgctagatttcttagggaaccatccctccattccagaaacaaaccttacttataatgtatcatacatagggatcactactagattgatagttactaatattttatttagcacttcattttatttatttttttgagacagagtcttgctctgttgccccggctggaatgcagtggcacgatcacagctcattgcagcctcaacctcctgggctcaggtgatcctcccacctcagcctcccaagtagctgggaccacaggccccagtacctggctaatttttttatttttaattttatagacacagtgtctcactatattgcccaggctggtcttgaactcctgggctcaaatgatcctcccacctcagtctccccaagtgctgggattacaggtataagccactatatccagccaactttctttcttttttttctttttttttttttgaggagtctcactctgttgcccaggctggagtgcagtggcgcgatctcggctcactgcaacctccgcctcctgggttcacaccattctcctgcctcagcctctcgagtagctgggactacaggcgcccgtcactacgcccggctaattttttgtatttttagtagagatggggtttcaccgtgttagccaggatggtcttgatctcctgacctcgtgatccgcctgcctcggcctcccaaagtgctgggattacaggcatgagccaccgcgcccggccaatccagcccactttcatatctttaataatagtaaactaatctacagtttcattttggtatcatctttatcagaattttggaattaaggtttaagaagcttcctaaatattgagaggacagactctagcatagcagtctgaggcgttccctggaacactccctagtgaaactgatgaaaagtattaaaaaacaaccatttaaagtctctgaaaatgttcctaaggacatacagccctatgagaaagatttaatgaggaaaagctactaaaactcagttccatgaagagttgtgatgtctgaaacacaacctattgcatccctgcctcccccagcttagtgtgatggaaactccactccagacagtacagccaagaagacaggtctgcccgcatctacccagatcatctcagttaaggggtatgatatcttcccaggaggaacagaatgtcagcatctatttttctgagttggagtttcactcttggttgcccaggctggagtgcaatggcgtgatatcggctcactgcaacctctacttcccgggttcaaacaattctcctgcctcagccttccgagtagctgggattacaagtgcccgccaccaagcccggctaatttttgtatttttagtaaagatggggtttcacgatgttgtccaggctggtcttgaactcctgacctcaggtgatctgcccaccttggcctcccaaagtgctgggattacaggcgtgagccactgtacccagccggatgtcagtatctctcatcccgcccccagctacctgctgatgaggctaagttctagacaagcatagctgagagagaacggttcctatcttctacccagccacacgcacgtggaatggaggcttgaccctgggcatggcacactaagaatataagggctcacatacccatggcttgttcataaagcagaggtcccatgccaggaaaggcaaaccaagaccggaggctacagcctactgtacctcctcccatgtctctcctaaagtggcagagtcactcagagagaggtactccattgtctccatccccagagccttggctcagagattctgcccacagtgagagcacggccttaaatcagtaaactcccaatctcaaaggaactgactgacttcactggcaagagtgttgggaagtgcaagactagggcctctctcaaaaacaatggagactagggaggaaaaaaattaaaaggacattgatagcttttttttttctttctgaatatttattggagttaaacactgatagctttgtccttttttttttcccccaccacacagccataaaaaagaaggaccggtagatttgacagtgatattagctaacccataggctaactaggttaccaaagaggacaaggaccagtgaaatagctaagaacagactccctgggttcagaataaatctcaaacaaccacctcaaaaaccatccctcttgggcctggcatagtggctgacgcctgtaatcccagcaccttgtgaggctgaggtgggtggctcataagatcaagagttcgagaccagcctggccaacatggtgaaaccccgtctctactaacaatacaaaaattagccgggcgtggtagcacatgcctgtaatcccagctactcgggaggctgaggcaggagaattgcttgaacctgagaggtggaggttgcagcaagccaagatcgcgccactgcattccagcctgggcaacagagcaagactcttgtctgggagagggggcggggaggggaggggaaaaaaatccctataaaggagcccaaatttaattggatcagattgggcagcaatctatgccccaaaacattgttgaaaacaataaagcaatcagccagcaattggtagagtttaacagctgagtatggtctgggaaaaagagcgagcccatggcttcctccctccaagacacaccaccagtttcatactgtgtgagaatgaaagagacctaactaaaaaaatctagcaagtcactaaacaaatagacaagcaaatacagtaacaagaccctgggagggtgggtgggggatcagtgcccagagttgccacaacaaattatctaagatgtctagttaacagtgaaaaattatgagacatccaaaggaaactctgacccaggcacagatgaaaaagcagacaatagaaacttcctgtgacagtgaacagatgtcaaattcaacaaacattttaaagtagcaattgtaaataggtttaaagaaaactcaagtagaagaaggtataatgacactgtctcatgaaacaatttaaacacagagatagaaatgataataataaaatggtaaatcttagagctgaaaagtacaataacggacaccaaaaatccatttgaaggactcaacagatttgaacttaagaattagtgaacttgggccgggtgcggtggctcacgcctgtaatcccagcactttgggaggccgaggcgggcagatcatgaggtcaggagatcgagaccatcctggctaacatggtgaaaccccgtctctactaaaaatacaaaaaaattagccgggcgtggtggcgggcgcctgtagtcccagctactccggaggctgaggcaggagaatggcatgaacctgggaggcggagcttgcagtgagccgagatcgcgccactgcactccagcctgggcgacagagctagactccatctctaaaaaagagtgaacttggccgagctcggtggctcacgcctataatcccagcacttagggaggccgaggcaggcggatcacaaggtcaagagatggagaccatcttggctaacacggtgaaaccccatctctactaaaaaaaaaaaaaaatacaaaaaattagccgggcgtggtggtgggcgcctatagtccccagctacttgggaggctgaggcaggagaatggcatgaacccaggaggcggagcttgcagtgtgcagagatggcgccactgcactccagcctaggcaacagagcgagactccatcacaaaaaaaaaagaaaaaaaaaaaaaaagaattagtgaacttgtgtatcaaaagagattatacaatctgcagaacagagggaaaaaaatgaggtaaaatgaacagtctcagacaaccatggcacactattaagtgatccaacatacgggtaatgagcattagaagaggaaagagagaaaggagtaggaaaacaaaatacttgaagaaacaatggctgaaagctttggaaggttgatgaaacctgtaatctatacatcaaagcagctcaggccgggcgtggtggctcacgcctgtaatcccagcactttgggaggccgaggcgggcagatcacgaggtcaggagatcgagaccatcctggccaagatggtgaaaccccatctctactaaaatacaaaaaattagccgggcatggtggtgtgcacctgtaatcccagctactcagaaggtagaggcaggggaatcacttgaacctgggaggcggaggttgcagtgagctgagattgtgccattgcactccagcctggccacagaccaagactccgtctcaagaaacaaaaaaccagcccaacaaactccacgtagaataaacacagagagatgcacaaagacataatgaaggtgccaagagtcaaagacaggggaaaaatcttgaaagcagcaagacaaaacaaatcatcacaaggaaaccccaatattaggttaaagccgacttctcagcggggcacggtggctcatgcctgtagtggcaagaccctgtctctatttatttttttttaatcaaaaaagggaactctgtagacagacacaaattactaaaaatgacttaaaaaaaaaccccagactatctgaatataccctataacaagtggagactgaattattaataataataaaaaaaaactagttaacaggctgggcacagtggctcatgcctataatcccagcactttgggaggccaaggcaggcagatcgcttgagtccagaaatttgataccagcctgggtaacatgacaaaaccccgtctctacaaaaaactaccaaaactagccgggcatgatgtcacacatgcctttagtccctgctatttgggaggctgaggtgtgaggatcgcctgagcctgagaggtggaggttgcagtgagccgagatcacaccgttgcactccagcctaggcgacagagtgagaccctgtctcaaaaaaaaaaaaaaaaaaaatctagttaacaaaagccaggcctagatggcttcataagcaaattctacgaagcacttgaagaattaatactagtatatactagttcttcacaaactcttccaagaaaccagaaaaggaagaaaaatgacaactgtatgaggccagtattaattaacctgatacccaaaccagacaaatatatcaccaaaacactacagactattatcttttatgaatatagatgcaaaaattctcaacaaaatagcagcaaaaccaatctaatatataaacataattacacactatgaccaagcaggatatatcccagggacacaagggtgttttatatccaaataaaataatctaacatactgtaacaacacaattaaagacaaaagccacatgatcacctcaacagaggcagaaaaagcatttgacaaagtccaacaccattttaagataaaacacttaacaggactagaagggaacgtcttcaactcaatcaagggcacctatgaaaaacccacagctgacatcacacttaatggtaaagactggtgctttccctgtaagatcagaaagatgaggacatccattctcaccacttctattcaatactgtattggaggttctaaccagggcaattaggtaagaaaaagaaataaagtgcatctagattggaaaggagaagtaaaactaactctatttgcagatgactgatgttgtacaaagaaacccctaagaaatccactaaaaactaggttgggcacggtggctcatgcctgtaatcccagcactttgggaggccgaggcgggtggatcatgagcaggagattgagaccatcctagctaacatggtgaaaccccatctctactaaaaatacaaaaaattagctgcgcgtggtggcgggcacctgtagtcccagctacttgggaggctgaggcaggagaatggcgtgaacctgggaggtggaggttgcagtgagccgagattgcaccactgcactccagccagggcgacagagtgagactctgtctcaaaaaaaaaaaaaaaaaaaaaaaatccactaaaaactattagaactaataaacattattttatgtttttatttttattttattttatttatttattttttgagatggaatctcgctgtgtctcccaggcacagtgcagtggtgcgatctcagctcactgcaacctccgcctcccgggttcacgccattctcctgcctcagcctcccaagtagctgggactacaggtgcccgccaccacacctggctaattttttgtatttttagtagagacggggtttcaccatgttagccaggatggtctggatctcctgacctcgtgatctcccgcctcagcctcccaaagtgttgggattacaggcatgagccactgcgcccagccttatgtttttattttttagagacagggtcttgctctgtcactcatgctggagtgcatggtaggatcatagctcactgcaacctcaacctcataggctcaagccatcctcttacctcagcctcctgcgtagcggggactacaggcacttgccgccacacctggctaacttgtttcttttatacagacagggtctcactatgttgcccatgctggtctcaaactcttggactgaagcaatcctcccaccttcacctcctaaagtgtttggattacaggtatgagctataatgcctagccatagctgaaatattattaaaattatgaaatattaaaaacaaatagttcagtgaggttgtagggtataatatcaatatattggctgagcacagtggctcatgcctataatcccagcactttgggaagctgaggcaggaggactgcttgagcccaggagtttgagaccagcctgggcaacatggtgaaaccctgtctctacaaaaaatacaaaaattagctgggcatagtggcacatgcctgtagtcccagctacttgggaggctgaggtgggaggattacctgagcccaggaggttggaggctgtagtgagtcatgatggtgccactgcactccagcctaggcaacagagtgagaccctatttcaagaataaaaaaaaaaagtatttttatacacatgcaaaaaaaatccaaaaatatcaagaaaacaattccattcataatagtaacagaaagaataaaatacttataaataatcttaacaggccgggcctggtggctcatgcctgtaatcccagcactttgggaggctgaggtgggtggatcccccaaggtcaggagttcaagaccagcctcgccaacatggtgaaaccctgtctaccaaaaatacaaaaaattagctgggcgtggtggtgcgtgcctgtaatcccagctactcaggaggctgagacaggagaattgcctgaacccaggaggcggaggttgcagtgagccaagatggcaccactgcattccagcctgggcaacaagagcaaaactctgtctcaaaaaaaaaaaaatcttaacaataaagaacaaagcttacaccctgaaaactacaaaacctttgaaagaaattaattcatttactagatctcagtaaatgaaaagacatcccatattcatggattagaagacttaatagctatggtcaactgactttcaacaaagatgccaagatcattcaatggggggaaaacagtctctttcatttctttttcaaatggtgccggaacaacttaatatctagatgcaaaaaataaagttagaaccttacctcatacgatataaataaattaactcaaatggaacaaagacctaactgcaaaagctaaaaccataaaattcttagaagaaaacacaggggtaaatcttcgtgaccttggatttatcaatagattcttagttatgacacccaaagcataagcaataaaagaaaattggactttataaaaattaaaactattgtgctacaaaggacacatcaagaaggtgaaaaaacccacagaatgggtgaaaatatttgtaactcatatcaaatatgggactttacaaaaagaactctacaaaagacaacacaattaaaaaatgcacaaagaacttgaatagacatttctccaaagatacaaaaatggccaaccagcccatgaaaagatgccattagtcagttatcagggctacgcaaatcaaaaccacaatgagatactacttcccacccactaggatgactagatcaaaaagtcagaaaatgccgggcgcggtggctcatgcctgtaatcccaccactttaggaggccaagacagggggatcacctgaggtcgggagttcgcgatcagactgaccaacatggagaaaccccgtctctactaaaaatacaaaattagccaggcgtggtggcacatgcctgtaatcccagctaggagaattgcttggacccgggaggcagaggttgtggtgagccgagatcgcgccattgcactccagcctgggcaagaagagcgaatctctgtctcaaaaaaaaaaaaaaaaaaaagtcagaaactaagtgttggtgagtatgtgaagaaatcaggacccttatatgttgctggtggaaatgtaaaatggtgcacagtcactttggaaaatagtctcacaagttaaagtgttattatttgatcaagacattccagtcctagtcatatactcaagaaaaatgaaaacatatgtccacataaaaacttgcacaataatgtttctaagagcattattcataatagccaaaaggtgaaaacaacccaaacacccaaaaagataaataaacaaaatgtgccacatctatctacacaatggaataatatgaagccatatgaaggaatgaagttctgatacatgctacaatgtggctggaccccaaaaacatcatgcttagtgaaagaagccaatcacagaagaccacatattatgtgattctgtttatatgaagtgtctagaataagcaaatagagagagatagattagtagctgcctaaggctggaggaggacaagaggttgggggggctgatagctaaagggtttctttttaaggtgatgaaaatattctgtaatcgactggttgatgactgcagaattctgtgaatacgtgaaaaaccaatgaattggttttttttttcatttgtttggtttttttagagacagggtcttgctctgttgcccagtctggactgtggtggtgcaatcataacttactgtaaccttgaactcctagcctcaagcgatcctcccaccttggcttcccaaagtgctgggattgcaggcatgagccaccacgcccagcccaaagactactgaattgtatactttaaatgcgtgaattgtacagtatgtgattctatctcagtaaagctgttaccaaagataacaataattagaagctttccattaatctctacagtctagaattctaaaaaatacagtatttagactgtattcaaattatctctgtaaaccaatgacttctggtgccttctaaatatctttcatcatccttccaaacctctctacggttaccagctgctatggcttgttcttttttttttttttaacttcttttaggatcaagtttgagtttatattttgctatcacctctcccgtattttccaacttttttttttttgagacagagtctcgctctgtcgcccaggctgaagtgcagtggcacgatcttggcttactgcaagctctgcctcctgggttcacgccattctcccacctcagcctcctgagtagctgggactacatgcacctgccaccacgcctggctaattttgtttttgtatttttagtagagacgggtttcaccatgttagccaggatggtctcaatctcctgacctcgtgatccgcccaccttgtcctcccaaagtgccgtgcccattgttttggtttttttgttttgttttgttttgtttttgagatgagtctcgcagattgctctgcgagtggcgcaatctcggctcactgccacctctgcctcctgggttcaagcgattcttctgccttggcctcccgagtagctgggattacagtgcccgccatcacgcccagctaatttttgtatttttagtacagacagcgtttcaccacgttggccaggaaggtctccatctcttgacctcgtcatctgcccaccttagcctcccaaagtgctgggattacacgcgtgagccaccacgcccagccagattttccaactttcattaatgacatatagtttccaccctctgcagtcttctaacccctactagttcctagcataagaatctgtttttaggccgggcgcggtggctcacgcctgtaatcccagcactttgggaggccgaggcgggcggatcacgaggtcaggagatcgagaccatcctggctaacacggtgaaaccccgtctctactaaaaatacaaaaaattagccgggcgtggtagcgggcgcctgtagtcccagctactcgggaggctgaggcaggagaatggcgtgaacccgggaggcggagcttgcagtgagccgagatcgcgccactgcactccagcctgggcgacagagcgagactccgtctcaaaaaaaaaaaaaaaaaaagaatctgtttttggcaagttccctaaagcttctctgttgccaaagccaactgacattttccttttcttcccagaactcttggtggcatttcccaatcctgagtctctgcaaccagagagacccctgaccctgtccaccgttcagaatcatcacaccgaaaaagaccagagaggaattgtgatgagcatggaagaagatggagaaatgctgcttcccatgctcaccttggatgcgaacatctgttcataaaccccaccaccctcctccagggtgaagacagccaagcccctctttggcccagacctggtcctgggcctctttgctctctgcccatacacagccccttcacccccacctgcaacacagcatgtcatccattcaatcaaaaaaacacctactctggcttccatgctaggcactggagcaacactggaaaatgagacagaatttgctcattctcttgccttatgttctccatgccgcacaacacacttccctactgctccctgctccctgacaatcttggcagcaccgctgtcctcccagttccccaagtcagaaaccagagtcaccccaggcttctgatcactcccacatgccagcccccggctcccttccttcaactgctcttctccccttcactcccaaggtggggtctcctcttgtctggagactgcaggagctcctccttggcccccaccaccccacccaggtgcaggcctgaagtctctagttcaacaccaactctaacctgttaatcccacacttgaaacttaactgcctacaggaacaagcccaggcctctcagtgcagctctcctgagcctcaagcccaaccccctcctccagcaacacttgcactgtatcatctccatttggtttctgaacctaatctggcgctggcccctatgaacatggaggtccccatatcccacagaatatatcaccttctcccaggcagagtccccatctctcacccctctctctgtagctgtgctgcctgcactgagctggaaatgtccatatccacctcctcctgcctccactgcagtccctcacgggctggcagaggttccaactgcacaacctccccagaggcctcactcaatctacccacaggacagagggagagcactgtggccactcaccctgcggttccggttgtgatccatggtcttcagatgcttctggatgatcccaaactgcatgggaatgaagaggtcgcaggctgcacaatgggctgcctccaccttcttcacaaaatgctccatggcaatttctgtagtggggaggagggagtcaccactgggcccaggtgcctaagatagacccaggtgttcgagaaaaaaaccacaccagctcctcctcaactcgccctgccacttccacctgggcctgagccaaggctggtctcctgaccttccctgggggaacagaagggtgtcctgaccctgcaccgaaaatcaggagtgcaggctgaggccttgcctggtgggagtgggctgaaaatctcctcaccctgggtcagatcctggtctctgtagatttgctggatgaggccatcaaggtcctccacggtttttcggagctcctctgtcttcttggtcttgttagtgacgtactcctgcaaggaatataaaggttcatgtgggccgccttatgttctcaggggtccaagaaactaagagcggctgtgttactccaaggctcacctgcagaaagtcagccgtctgcttagggagcttggtgcctacgtacttaaagtgttccttgtggaacttgctgtcaagatggctggccatctcgtcctcatagaaggtccggtatttgcacagagaacacacaaactggatcctgccacaggaaggaaacgaggggctgaggctgcaagtgtcccaggggatagtgctgccgcctcacccaacccagacacaagccctgaaacaggccttgctcacgggcctctgaagtacggtcccagcagagggacaggctgggaccagtggggtcgggagtagaaagggccagaaagtctgcaggctgcagttactgcaacgtaggggacaggggaggagctcttccttcccacaggcaggaggctgaagcctgagacagcagctgctgcaacaggcaacgagtcgctggaaagttgctggagggcctcgctaccaaggctgggcaggagcgtgtgcacttggcccaggtggggaccggaaggaaggatgccctggcgtgagccaggtggccctgaggtgcagagtggagtacgcagtcccgaggcagggcccgaaaaggtgctgcatcttccttctgggatctgggggactcaaaggcccagcccatcctctgctcagaatgcttgggggtggtgtcgggagggatgggaggcagcaggcctgggcacctgctgcctcatcttcctcttccaagaagagaccagtctgagctggaaggagggcgcccgctcggcctgccagagggcagcctggagtcacctgggcgaggtgctctgtctgggcctggtgtccacagtagaagcccggggtctggggcctgggccggagcaggccgccgtggcaaggggcggaggaggccagccgccaccgagacctcggggcgggtccctacctctgccggacgtccttatctgggccacggggtcagctttgtctggagagcccaggggccgggcgccggcgaggctgaggaaggtccagcaagagcaagagtctgaggcggaggaggcaagcgccagtgcgggagccctgagggcagacagacccgaccaaggggcgtgaagggctcagccgcagacaggcccggcctgacagggccggcgggcagggcagaaggcaggcccgaggctgccacagcccacaggtgctgccatctctcctgggcacggcggtggcctcttggcagctagctggggcggcacaggcgccttggaccttgagtctctgatgagctggccccctccctcaggggcatcaggcccccagtgcaccttggggttcgtgcgccgagtgacctagcgccagagcttctgagcaacggtgccgagcggtgtcaggtctcggcccacagacgccagcggtcgccaggcggccgcagaggggcaggggatgagtcaggccttgggagctgggcctggcgggaagcagggtccatgcacggccgagcaggtggcggctcccaagggaggccagagggcggcgagctggcagagctatggccctgctctcctggcggcagccccacagcgaggcagaggcagaggggtggagggaagctggttacctttccaccatgcggtctcgctgccgctttttctgcttgtcctgactcttcttgcctgcctgcaacttgcgcttggtctggccattttcatcctgggtggttagggcccctgtgggagcagatgggcactgtcaccaatttggctctgccaggacagggcaggccctgcggcctctggctgaatcacccactgtccactccagagggtccatcgagaatagctgtccaagcaaggcctctggccatgagcagggctgggtatcctgggctgtgcagggagtgggtttggcctaggccccaaggagtgggggccaggcgatgacccctccactctccaggacacccatgctctctgtgcagtgggccaggaggaggctggaaagcaaagagggggtatctttgtggggacactggcacatgttcagaggggccaggtggtgggatgcagggaggctgctcacatggccctgcccacccccaaccgggcaccgcggcaacagtgggctgacgctggatttgctgttaggtacctgctggcgctcatcactcaggtggggggacacggaatcccaacaggggctggagaggtgctaagggagaggatacgcacaccagagccgtaaaaactgcaccgagggtcccagatcggacaccagccactgaggacttggaactgcgcgttactgagggaccgagggcagggggcgtgcctggggttccccacacttttactagctgcccccatctgaaggcaaaaccagtgtgctaggcaggggtcaccaccatccacagcctccgcctgggaaggaggaggaagagtgggaagggggtggaggcggcgaaaagaaagccccctgccagcacacactcgggcccacaagggaggtccccaactggccgcatgtctgccgcaaccctgccctcagctgggtccctcccactgtgagcccctggaagagccgccctagcaccaggcaccccaggaaaactcacccttctctggatcctctttgccttcttctctcccatcctcttttccctcctcatcctctccgtcctaacaatttcaaattccaactttaaaacaggtgcctttttttttttttttaaaagaaaccaagtttattagagcaacggtatatagtaaaacagctgcttgctccatagacagagcagggctatcctataggcagggtggcccagagtagcccagttatttacaatggctttaaatgacaaggcccggctatgtgccagaaacctcacatcctcccactacctggtgcacaggggctcatcccattttccaacaaggaaactgtgcctccagctaggcagcctgtgctttctgccagaccacactgcctccccatgctggtcaccatgcacgcagagctgacacagcattgcctctggcccccagggagagcaccactctttaggccagctcgccctgcctgcagacagaaaatgcccagccagagccacttaccactctggagcccttctccacagcctcggtgccttcaaggccctctgtggcttccccctcggtgccctcatctgaaagggaaaaggaggtaagctcaacccaggagttcccagaggcagggggcagccgcccagtaccacctagtgggctcaccattgtctgagtcgctgttgtccgagcagtccgtgcgggtggctttgctatctggctcatcaggactgccgccctgctttctcttcttcttcttggtctgggtcataagggggggaagccgtgtcagggtgcatggcacccggcccttagctccgccccagtgggaactaagcttcccagaggggaaggctgcctccactcactcggaagtcggctgtggtccaggtcttccaggtccgcctcatctgcttcatgccattgccaaacccgaaaccaaagcgggagccgcccgggaaggcgcccccacctcgcatgccctggaacatgccgtactcggggatgatgttctgggagaagagggagggcagccgagaggcaccagacatgcactggccccgggcccccatggggtcttcccacatgcgcccatagcctgaggccattggccggccgctccgggcatcccgggcccagccctgtgccctgggaccgaaggtgtcgttgccacgcatgcggaactggtcgcggtaggcatcgtattggccctcataggccatttccatctcagggtcaagctcgctgtagtcatagcctgaccggtacaggtcgcgctcactcaggacggccctcgagtcgcaggactcataagagtcatacctgcagaggcatggggtgagcatcaggtggagcccctcaggatccctcacctccaggcaactgctcctgccctccccaatctcccagtccagcacccaccctgccctggttgggaggctcaatgttcagaaatgccgattaaagagttccagcctctcagctgatataggggcaccactgccccaaacttgaatgtagccacacactggcttggggaccctaagaaggactgaaggactgataactggggtggaggctctagtccagtgagtctcaacaaggggcagagctgctccacagccctttgggaacatgtacaccatctgtgggagctgcaacgcccaaggctgctcctcacagggcaaggctgagcaccccagcaccctgcaggatgcaggcaggtccagcacaatgaatgcgcagccagtgaggctgatgatacccatgggaaacactgttcttgtccctcatggctggggaaccttcaaactctgcaaagtccctcattaccaaaacaactgagacaaaagggggagtatttcccagggaagacactgagagcttgcccagggacaagaaaaagagctgtattacatcaaccctggagcccagagccagacaccaaactctatataccctgtattgcaactgggaaggcaggccagacctcctcccaggacacagagggcaccgcagagagctcttttaaccgtgactgcagcccgcagcccacacccctacaggcctggaccccacacacctcacaggcacaggggctccccttgcacactcttccctaaacctgggccaccaagaggcaccggcagctctaagagcagcagttggtgctgccgctgctctgcttaccccgatcccaggctccaggctgtggtaagaaggtgcatagcagcaacgcaaggccaagcctcacatgccaagccctcagctctgagtgctgcagctgttgggccaggagttacagagcccatggcatcaaatccccttgtgcctgttccacaccctgccaccacagccctggggcctcccttggccctatcagtgctcagccaggcaactccttactcttggctctcactcatctgttagctggtgctccactctatcccatgttagagatacacccacgctcctcaccaaagcctcgcactgggcataagcactcctgggccaagtccagttcagttaataacaaatgcccacagcatgatgctttggagtagggcagatctggtaggcgaggcccagccccaccaagtacttgctgcgtgccttcagggtatgacctgcctgcacttctgtatccccacctgcaaaatgaggacagcagcagttcctcacaggagtgcttccatcaggtacatgtttgtaaggcacaggagagtaaccaggaaatgcccacacctgccccgacccttacgtgggggtggcccagctcgcagtgatcagccccaaacgctcgtcccacccttcacaccaaactccatctgtcctgccctgacaccacgcaggaggcaaagtctcgagagaattccaaatggctgtccttggagggaggggtggctgaacactctgtttttgagggcacagtgaagtctgcccagtctgggcttgttcctctcaccgcaagctgggaaaggctgaccaccaggcagtgcggcaggggttgagggtgggtgagaggagacacaagtcagagacgggaagtgcaacggaccctgctgggagccacagcagcaccaagcagcggggaggaagcagacacagaggggcactcagagaggaaaacgcagtgggcagcaggcaggagccgcccctgcagagtctcaacccctaggcaggtgtccactcacctttctccacctgagccgtacacgcctccttgcatcatgtctgtctccaaatgcggcaccatatctaagcgctggttaattctggataaaacggaatcggcactggcgctacccgaggcactagtgtttgcatttgtgtcagagctaggcatttcccaagagtgtgaagtggccataccatacccatagttggtggtgttatcctggccatagccatagccatagccatagccctcgtagcctgcagtgagggagacagagacagacagatggtgggggcaggcagaggggaggcagacagagacagagacaaacacagatacaagggtatcttctgtcacagagagagaagaccctagccactgaagctagatgggccctggtcattctgatgagggcctcctgttaaggagtaggtaaccccagaaacatgccccctccccactcccaaccttggccaagcagggcagtggcagagaaacacagccaggacaaccccaagggacaggacagcaatcacaggaatgacacttgcctctatttgtcccagagttccaagttccatatcctacaaaaagtaaaagggcagttacatctatacttgcttacaatacaaggccataattcaggcgcagacaattattcccaggacctgactggtcagagcaggctgcacctcccctaaccgagaagccttgagctcgcgagcactgcgcaaatgacccaggccacttgctgccctggtgcctggctgcctgtggctctgagcatctgttatttaaggatccttctgttcccaacactctcaactaaggaacttggctcctatactcctccctttaagagccagaattagaaggtgacctccacaccccaagctaagtgctaatcagtttatagcagaaaacccaaccccagtctcccaagagtctgccttaaaagggagggccaacaagcccttgaattgttgactgtgctgtgctggaacacatcagtgagagaagcccaagaagcaacccctcgcttgagaaaagctgtggagagaacaatctggattatcaacttaatatgctctggattcaatcacaacacatgataaaacctcattccttcagtaacataaagccactgagaagtgacaaagtgtaaagtcccctgggaactctgagtcaaacacacagttcctccccaaaggagggcacagagcaggtgacccctttccctgggtctctggtgagacccaacagttgtttcccattccatgtcatctctgccccgcagaggacatgctcatcccagggcaggggaccgaagctcagtgagacagacagcagggcaataagtggcagaagccagaccacagcaggaagagtgtaagtcaactgaaaagatgagccagagagaacaggcaggctgtcgtcctgcacttgggttcctccacgacccagtgcacaaaaagaatgggaagaaatcagagagaagctgaggaactgctgatgaccactatgtttaacaagagagctcacaaaacaaaaactcttgggctggagaaaccaaaacaggcttctcatccatttgtttatgtatcccctgagcacagggaacagaggcttgcagtcccaggcactgctcaggcatggagatctgcctgttggtaagagagatgctaacagccagagagcagcatgggtaagtcaggagtggtagctgaggaaagaatggagccattctaagaggcaagagaggctggcagagccacataaagaaaaacacacaaggctgggtgcagtggctcacgcctgtaatcccagcacttcgggaggtcgaggcgggcggatcacctgaggtcaggagtttgaaaccagcctggccaacatggtgaaaccccttctctaccaaaaatacaaaattagccaggcgtggtggtgcacacctgtagtcccagctactcaggaggctgaggcacagttgcttgaacccaggcggcagagtttgcagtgaggtgagatcgcgccactgcactccagcctgggcgacacggtgaaactccatttcaaaaaaaaaaaaatagaacaacacacaggtagcccaggcagctactgtacacctggccaagtgactgtttgtaccagggacagtgggcactagctattctaaagaaaataggagttgggcgtggtggctcatgcctgtaatcccagaactttgggaggccaaggtgggtggattacgaggtcaggagttcgagaccagcctggccaatatggtgaaacctcatctctactaaaaatacaaaaattagccaggtgtggtggtgcgcgtctatggtctcagatgcttgggaggctgaggcaggagaatcacttgaacctgggaggtggaggttgcagcgagccaagattgcaccactgcactacaggctaggcgaccgagcgagactctgtctcaaaaaaaaaaagaaagaaaagaaaaagaaaataggatatggaggcaaaagcagatccatcagggctctgcttgggaggctacaatgtggtcactgcaagcttcacctgctgaggatctgccacaacagagtgaggaggcacaacgaaaggaagcagcatcaactccgtgaacaccactttacgttttaaggacaagcagggcctcccacgatgggcaactctcaggagtccctccaggcaaacactcactacatgccacttgctatgcctggagcaacccagactccttgatggacatcccagctgggtcccttcaggaggaagccttcatctagactggcgtttagggactccccaagacctgccctttctgaaagaacaccccaactcatttccatccccagaagggatgagatcatggttgacaaaagaaattttaaggagagagagagagagagagagagagagagagagagagagagatccttaaaatttatatatttattattattaaatatatacatatatatgtaaaaataagatatatgtacatatatatttttgagatagagtcttgctctgtcctccaggctggagtgtaatggtgtgatcacagctcactgcatcctcgacttcttgggttcaagtgactcttctgcctcagcctccggagtggctgggacaacaggcatgtgccaccatgcccagctaattttttctatttttgtagagatagggttttactatgttgcccaggctggtctcaaactcctgggggctcaagcctcccatctcagcctctcagagtgctgagattataggcatgagccactgcacctggccccaaggacataatttttaaaagaaaaaaggacatggtcacagtatgtgatatttatggaccaaaaatagaaaacaatttaacactcaactttaacgtaatagttaatcagattacacctacctactcggtgacatatcatgtaagcatataaaaagaatttactatgccttatgtggcacaaggaaatgcttctaacataaaataaagcaggaccagccaggcgcagtggctcacacctgtaatccttttgggaagtggggcaggcagatcgcttgagcccaggagtttgagaccagcctgggcaacatagcaaaaccccatctctagaaaaaatacaaaaaatagctgggcatggtagggcatgcctgtagtcccaattatgcaggaggctgaggtgggagggctatctgtgcccaggaggtggaggttgcagtgagctgaaattgtgccactgtgctccagcctgggggacagagtgagatcatatcttaaaaaaataaaataaaataagagcagtacccacaattctatccacctataaattattaaactacacaaaatcagtaagctgataaaaattaaacattaatatggtaggatcttggttgactgtttttcaaaatgttatttaaatgttatattgttcttgcaattcaagccagaaggaaaaataaatccatctctattctttcacaattgtgtatgtaaaaaaatctcaaacaaatctacaaaagagctactagaataagtgagcttagcaaggtttattacaaggtcaatctgtaagtcaaatttcaaatattacaaggtaaacctacaaatcaaatagcaatcaaatttctatatatcagcaatgaatggaaagtttttaaaagtaccatttcctatagcactaaaagcatgaaaaacttggcgtaaatctaacaaagtatgtgtaggatctgtgttgaaaactacaaaacactacatcagtgaagtgacatactgcactcatgaatcagaagacttgatattgttaagatgtcaattttctcaaactaatctatagattctacagatttgatagatctatagatccaaggctctctcactcaaaatctcagcatgaattttttaaaaaacttcataaactgattctaaaatttatatgcaaaagcaaagaaactaacaattttggaaaaaagaacaaacctggaggactcatatttcaagattactattaaccagtaatcaagactgcattgctgggcgaggcgcagtggctaatgcctgtaattccaacactttgggaggccgaggcaggtggatcatgtgaggtcgggagtttgagaccagcctggccaacatggtgaaaccagtctctactaaaaatacaaaaagaccgtgctgctgaacgaaatttagatgtacagaccaatggaacagaatgagagtccaagagtccagaaatagacccacagtatatggtcaactgattttcagtaaaggtacgaaggcaattcaatagagaaaatataggcctggcacagtggctcacacctgtaatcctagcactttgggaggccaaggcgggtggatcacctgagatggggaattcaagaccagcctggccaatgtggtgaaaccgtctctactaataatacaaaaattagccaggcgtggtggcacatgcctgtaataccagctatttgggaggccaaggcacaagaatagcttgaatctgggaggtggaggttgtggtgagctgagatcgcgccattgcactccagcctgggcaacaagagcgaaactccatctcaaaaaaaaaaaaaaaagaaagaaagaaagaaagaaagaggccgggcgcggtggctcacgcctgtaatcccaacactttgggaggccgaggcgggaggatcacgaggtcaggagctcgagaacatcctggcaaatacggtgaaaccccgtctctactgaaaatacaaaaagattagccaggcgtggtggcgggcaactgctcgggaggctgaagcgggagaatggcatgaacccaggaggcggagcttgcagtgagctgagatcgcgccactgcactccagcctgggggacagagtgagactctgtctcaaaaaaaaaaaaaaagaaagaaaaaatggttttgtttttgtttttgttttttaaacaaatggtgctggaacaattatatatttatatgccatagaagaataagaaaccttaacctatactgcacaccttgtagaaaaattaactcaatatggatcacagactaaatgtaaaacccacaactaaaacacctaaaagaaaattctaaagaaaatattacagatttcttagatataaaagcaaaaccatcatctattaaagaaaagattgaattgggcttcaaaattaacaacttgtgttctttctgacacaagacaagacacactgacaagagaatagacaagccacagtctgggagaaaatatttgtaaatggcatatccgagaaatggcttgtactcagaatatgcaatccagagggaaaataattcaaaaggatgtgcaattagggactacatttgatgaaaagggagaggcagggagggcagcacagggaagtcaagcaaaccaagtttctcctcatttatgagacacctgataccttctcactcaatttcaaaatattttaagtcttcccttttcctgggactagctgctgttacttggggagcttacttaagtctctttatgcagtgacccctgaaggcatgttagctgtgtaggatcagtctttccccagatcttggtagtaaaagaaattacccatctcagtaactaagacattatccctgttaattccaaagagggctccttctcaacagatacccctagagtcacagacaaccaaaaaccagctttaacagcagtccgggctgccacagcacacaaacaaaacagcatctgtgaatcctactggtggctacttctgaattagctaattaggtgtttctgtccacgctggaaaactcaatcagagatcttcactcaactctgtgtgtgtggagcctgctggcttgaggtggcctggctgagtctccaaaagctgccagattcacacactcagcctctctcccacagcaaggacatgcactatgctgggactaagttaatagcttgctttctcctggaccaatcctttggacttttttttttttgagacagagtcttgctctgttgccaggctggagtgcagtggcatgatatcggctcactgtaacctctgcctcccgggttcaagtgattcccctgcctcagcctcctgagtagctgcgaccacaggcacacaccaccatgcccggctaattttttgtattttagtatagatggcatttcaccatgttggccaggatggtctcgatctcctgacctcaagtgatccacccgcctcggcctcccaaagtgctgggattacaggcaggagccaccgcgcctggcctcctttggactttaattggccactgtgactcccagtccctcccccatggggatttgaagccaggccttttatcaaagagcctaacttgctcaggaacacagctacttttcccataattgcctgaaagggaagcactagctattcaaatggccacaccatttcacacaagtttaggtttaaaaaagcatgacagggtgacagcaaagccaaaggcaactaagaagacaaggaactgctctgcagaacactttggttcccaccagaagtccacacttaccataatcacaggtgggctgagcgctggtatccgagtatgtcgactgcaaagtggtttcagatccctggacaaagcctaaacataaagacagtggggttaatttccacaagcaagtcacagggaaatgacctgagactacctaacctttggtataggattgccagcaggcccttctctcaacgaaaagccaccaaaacctctagattccacagtttaattagaccgtcagaaaatattacccaatggaaaggcaggctatgtttaacttgctataccaggaggactagattaaaaaattatttatttactttttaaaaacaaggtctcactctgtccgggctgcaacgcagtggcatgatcacggctcactgcaacctcgaccttccaggctcaaacaatcctcctgcctcagcctcccaagtagctgagactatacgttcgtgccatcattcgcagctaatttttatacttttttgtagagatggggtttcatcatgttgccctggctggtctttaattcctaggcttaagcaatccaccctcctgaacctcccaaagtgctgggattacaggtgtgagccacagagcctggccccaaataaaaatttttaaacatttaagccagtagcctattttgagaaatgaacacccaagttatcattctgttaaatgaggaaactattcaaatccctgaagggtgagccacttggaattcaaacaaggatggaggttagcttcaaaaccatgttaaagcaaataatacccccctccctgttctaaatctgaaacagaaactgctttttattttggttttcccattaaaaagtgtgtataacaattataacaattatttctgggccgggcagtggctcatgcctgtaatcccaacactttgggaggccaagatgaccagcctgggcaacagggtgaaaccctgtctctacaaaaaaaaaaaaaagccagctgtggcagcatgtgcctgtagtcctagctacttgggaggctgaggtgggagtgtcacttgagcccagaaggtcaaggctgcagtgagctatgattgcgccactgcattccagcctgggtgacagagcaagaccctgtctcaaaacaaaaacaaaaacaaaaaacaattatttcttaaaagtaattatttggggtggcatggtcatatggaaataagtattattatatatacataaaatttcctatcttctcaactttcaaactatttctcaacataaaatgaattagggctggatgcagtggctcatgcctgtactcacagtactttgggaggccaagggggggtggactggttgaggccaggagttcaagaccagcctggccaacatggtgaaaccccatctctactaaaaatacaaaaattagctactaaaaatacaaaaattacagggcacagtggctcacgcctgtaatcccagcactttgggcggccgaggcaggtggatcacgaggttaggagttcgagatcagcctggccaatatggtgaaaccctgtctctactaaaaatacaaaaattagctgggcgtggtggtgtgtgcctgtagtcccagctgcgcaggaggctgaggcaggagaatcgcttgaacccaggaggcagaggttgcagtgagccaaaatcatgccactgcattccagcctaggcgacagagcaagactccgtctcaaaacaaacaaacaaaaccccaaaattagctgggtgtggtggcacctgcctgtaatcccaggttcttgggagggtgaggcagaagaactgcttaaacccaggaggcggagattgcagtgagtggagatcgtgccactgcactcaagcctgggtaatagagcaagactccatctcaaaataaataaataaatgaaataaaataaaatgagttagtgccaagtaaggaaaacttctacctctatcagaaaccagtgctcctacagactatgactgatgctaatcctgacacttgctttaaaactacattaaaaaaagaaaaaacaacaactctacagttagaaatacatatatatttttttgagacggagtctcgcactaggttggagtgcagtggcacgatctcggctcactgcaacctccacctcccgggttcaagcgattctcctgcctcagccttctgagtagctgggactacaggcgcgtgccaccatgtccggctgatttttttgtatttttagtagagatggggtttcaccatgttagccaggatggtctcgatctcctaaccttgtgatccgcccgccttggcctcccaaagtgctgggattacaggcgtgagccactgcgcccggccagaaatacatatttttgaataattttctctcagcactgaaattacgacagataccataagaggcagtatttgcctttcccatcagagccaactcatgacctgaaaattaaagcctatgcctttaacagcttgtttacatcaaaaacctacagaagtgccttccccctgggtaagcgttctcttatttgttgacagtgtctctattttatctcttaagaccacagcagcagcagccaacagcaaacaagtgctttccctgcagggtgctaagaacatttatctgcaatgatctcatttcatcctcaccacagacaataagggcaggtgggcaagattccttactctgcaattcccccaggtccaaaagggtctgaacaccaagtgttttctaccagtgtggtgccaaaactcacgctggagctgttttcacctgtaaggacatttataatctttctttgtcctacttagtgcagaattaatctatttaaatacaaggtgcttccccagaccccacgtgacttctcttaagctagaattccaaaatacatctagctccaagggttccaaagacggagctgtgaacccagcttcatcttcactttccagagtagggactgggacttgaggcaggataaaaccgagggtatacagatccagtcttctaccttccctaagtaaagaggctagaaatccattcaaatggattccttccagggatctggaccttcctgagatgcctaaaatccaggcattgttgattaatagctgtccataagaaacactgagagcagctttgaagagttcacccaggggaaagccttataatgtaaggaatacccagcccctgcggtctccactgtttgctcaactggcctctggaaacttgttctttcagcaattgggccaccagtaaaatggcctcagactttaggtaatgtgatctgtgagtactgcaactgcaaatgacagcctaccacaccctcacaagatacagtcagcaagctgctgagcaaaatatctgtgtctgttcaggcgagaggggccctggtgcttccctaggaaggaaagacgatccatcaaaccctccaagatcaatggcaatctctgctctaactctataccctgcaccacattaacattctgttccacaataccatctgcaaagatcgcagagcaggcccttctgtagccagttttggctcctattatgaataattcttttttttttttttttttttttgagacggagtttcactcttgttgcccaggctggagtgcaatggtgcgatctcggttcaccgcaacctccacttcccaggctcaagcgattctcctgcctcagcctcccgagtagctgggattacaggcatgcgccactacgcattttgtatttttagtagagacgggttttctccatgttggtcaggctggtatcaaactcccgacctcagaagatctgcccgcctcggtctcccaaagtgctgggattacaggcgtgagccaccacgcccggcctaaattcttagctggtttgtaaagtgttctcttggtacaatttatcagcctgattagcgctggttgaaaaaaataaaatatgccctatatggccctataaagctaaatgttagatcacagatttctttttttttttgtttgtttgtttttgagacggagtctcgctctgtcgcccaggctggagtgcagtggcacgatcttggctcactgcaagctccgcctcctggggtcacgccattctcctgcctcagcctcctgagtagctgggactacaggcacctgccaccacgcctggctaattttttgtatttttcacagagatggggtttcgctgtgttagcgaggatggtctcgatctcctgacctcgtgatccgcccacctcggcctcccaaagtgctgggattacaggcgtgagccaccacgcctagcccacggatttctttctttctatttttattagagacagggggtctcactgtcatccaggctggagtgcagtggcacaatcactgctcactgtggcctcagcctccggggctcaagtgatcctcctacttcagtctcctgtatagctgggactatagccacgcaccaccaggcccagctaatttttgttttctttttctttttttgttttgagagacagggtctcactatgttacccatgctggtgttgaattcctgggcttaagcaatcctctcactttgagaccatggatttctagttctgcagcaacactccttgcttttaaccaatctctcgtcaactttttttgctcaaaaatacaaaagcaggccaaatgctgtggctcatgtctgtaataccagtactttgggaggctgagttgggaggatcacttgagcccaggagttcaagacctgcgtggcaacatagtgagacctcatctcagaaataaaaaattagccaggcatggtggcatgcacatgtagtcacagctacttgggaggctgaggtgaggtgggaggattacttgagcacaggagggcgaggctgcagtgagctatgattttgtgccactgcactccaacctgggcaacatagtgagaccctgtctcaacaaaacaaaacaaatgcttctcagttttatacttttcctttctcctttttaaaaaagagtatatattttcttgagacaggatcttgctctgttgcccaggctggagtgcaatggcatgatcatagctcagcaatgttgaactcctgggctccagcaaacctcccagtcagccgggcgcagtggctcatgcccgtaatcccagcaccttgggaggccagggagggcggatcacaaggtcaggagatcaagaccatcctggctaacaaggtgaaaccccgtctctactaaaaatacaaaaaattagccgggtgtggtggcgggcacctgtagtcccagctacttgggaggcggaggcaggagaatggcatgaacctgggaggcggagcttgcagtgggccgagatggcgccactgcactccagcctgggtgacagagcaagactccgtctcaaaaaaaaaaacaaaaaaaaaatcccagagtctcgctgtcatccaggctggagcacagtggcacaatcatggctcactgcagcctcaacctcgcagagctaacttttttatttttaatttttatagagaaagggtcttgctatgttgcccaggctcatctcaaactcctggcctcaagcaatcttcctgcctcggcctcccaaagtgttgtgattacaagtgtgagccaccgtgcctgatctaaaaaaaaaaaagagtcttatttgaaggagtaacacagagtaccaaaaattaaaagataactggaattaggttaggttgccttcaatctttattatctgagccaagagtagggtgacaaccatcctcaaagatggtctccattcctgcctcttaacgttatgtagatccctcccaactaatagagctagccagtgcaaccaataagatttatgaaaatgactgagtgtgacttctgggattttcgccttgctctttctgggatcattcagtctggagaaaaccagccaccatgttgtgaggatactccagcagccagccctagggagagatccatggggccaagaattattggccagcatcagcctgccaggcatgggagtttaagtcaccttggaggtgggacctccagcctcagtcaggctttcagatgactctagtccacatagagatcctaaatgtaacctcatgatattccaagctagaaccacccagtgaaatcacctatccattccaaacataaagaaactgtgtgagacaataaatgtttctatgacaagtacagtagcatttcagacctttgtttgagggcctgattctggatatttctgtgctgtttaccactgctctcctcttcccctctcagtgctagagatgcagcttcctttcccacgtataaataaggtaacagggttcaaaagcagggcgagttaataaaaagatttatcagtcaccttttatgtttaataatgctaacatttgcttcgaggcctctaggacttacccttaaagctattagttgtctgaaatgtgaattaaaatgcctttgactttagtgccctacttcttaaataaggggaagactcacattgtaaattactgtggttttcagtttatcaagataaaggaaaaactaatcattacttttttagcttggctatctcagtgcccacccaaacccagaactacagcctacaagacctagagctggaattcaggtttggtcattagtgaccttgtatctcagtttcctcatctattaaaaaaaagagctccattactcagctaccccacagcacccaaccattcatcttctggtttcttcaagagtcctgtttttaaaaaccatgaaactgtcttccagttcttggtaagacttggtgagaattatattccaatcccagggatgtcagtaacaaccccatagtctttcctcctgaactaggaaagctacagaaaggctctggcagagctgcccaacttgggcactactgatgtttgacgccagatacttctttgcggtaggtgtcattgtgtataccgtagcagggcagcatcccaaacctccatccactagataccagcagcactcccactcccatatgtgacaaccaaaaatgtctccagacattgccagatgtcatctggggcagaatcacccctggatgagaacccactgggctgggggatggttgctagaaaaactggggttcttggaaagctcctgacctggcagccagggtagaggggactggcactaccttcttgcctatgccaacataaagtggtctacaaaggagccccacagactcacgttgcattctcagttctcaaaattccaagtagaatgcaggttacctggcaaccacacacgctcaagcctataataccctcaccaaacagggaggcctagtgtaagtctcctggccgagaagcctcatcagtcactgccaaggcaaacccaggaggccttggcaattcacccagtgatgatttacagtcgcccaagcatattgcggggggcggagaggggctctcggatctgtcacccactctccctttcaaatcccattggcctcccactggcctccctggctgatcttctaacaagccaggcagttcctgcccgtaagccttttacagcaaaagctccctgggccagatatctttattcgctccctccatttaggtctctgctcaaatgtcacctctttacagaaggctccaaccactccacgtagtggagcgacccccgcacggtactgaccaccctaaaatatatcctacactcgcttatttgcctattaagatcctcgcctctaagctgcttgaggaattcttgtctgtattcccaatacccagtctgtaccggacacggttcatttgacagacgcagagggaattaacatggaaccttgtcattccttgcagttcagcccctaggggcccaaggctccccgctcagcccaaacccttccaatatttacttatccccctagggcctggcgcctttcccagttctgaaatagacaaaagggggtggtgggtgggatcgggatgggggtgtagagctgcggcgtttttgcagagaaactgcgcgggggaggacgcgacaatggcgacggcagccgagcctgctgcctgctcgcaaggaccaaggcctgagaaagggaaacctaaggcgtcgaggtccaggagcgcaggccagggacggaggtggtgggggcggagacctcgtgcgctgaggcccggacccacggacacaggcgacagaagccaagacatcaggcggccgggagccgggacgccggctgcagacacagagagctgaggcaacgaggcgtgagggcagcgaccctgaggcgacgggccagcggcgccattttgtgaccgcagggaaggcagtgacggggccccaggggaggtgcgggcaagcctggtgcggcatccgcacgtccctgtcccatcccccacgcagagcccgaccccaccctgccaggcccacctgtgtagctcatggtggcgggcaacacaacatccgacgacgccggcttctgctgctctgaacatccgacgctgcgatagctgctgctaaccacagggtcccctccacacacacccgagccccgcctcccgaccgcattggctcataccggcctcggcttcacgtctattggaaggaaccgctgtctatctctatgcctcctcatatcagtggctggaagctgctggcaatctcgtgagagccccgccttgtccccgccttctgttattctaaggcctcagtgattggcctacagaagccggcagagaggcggagtcctatagaatttgagggggcggagctgtgcactacggaaaggcccaaggcccaagcatggtcgggctggaggagcgcccgtaccctggagacccgccagagggagtcgggtctacggctcagggcagggctgggatgccaactccgccaccgaggtgctgggtaggggacctagctaagtctctcaaattctctggccttcggctccaaaacaagcatagcaaagccatgttgagaagagaaaattaaaacagcaccaaacaagatgctggacacacgtttcaacattacgtgacaaagtgtgtgtaaagaaatcattctggtgccagtgcactgaataaatgtgattaatcgtaacaaaacgataatatatttatatggcatatgcttatatgtgtaataattccgtttgtattgtgtgtcattcgaatgctccttcaaacctgcaaaaagcttttaatcctcacttaaaactgaagcttggaactcatgatttgctcaaggtccttgacagttacgtgttaaaatgggagctttgcttctaaaaccctcctgattcactctgggctcgagagatcctgcaatagtgcagccgggcaccagtcatgtcctcagtctgtttcctgggcatatggaaaccctgccagggacaactcataatttctagagatgacagagctgcaccgaagagtacttaacacgtgtgtttgtgaaaactcattaagctgcgcaattacgacttctacgcttcgtgtgttttaaaactttttttaaggtatgctgtttctttttgatattgttgatttctttaggtgtaatagtggcatttacaacgttgagagaaacatactgaaatactaagaagttaactgatcttatggccaggatgtgcttcacacaattcagacaggtagagagaggaggaggaagcaaggagctataagataaatctctgacagctgaagacattggtcatgggttggtgatggatagatgagagtccattttactgtttgctctacttttgtatagttggaattctccatgataaactgttttaataaaactccccccacccaaatgaggcttctgcagaacttgctgccatacggaacaaagccacttctgatgtgttaagtgagcaaactccaaacatgaagcagagatctgacggataagcactctggcttcggggttcatctccccatcagcctcagggatgcctgcctgtcttccaaaccaaggcagggccccaggacacgtcttctgcgccctgcaggttcgttccttcatcgcacttgccacagtcatcattgtaccgatttgatttcgttcacatccaacaccctcagagaccacggctcaaaagctgagactttgctgcctgaggtgtattgaagtggcttgagcagagaagagcaatgctcagaaagttttaggaaaacatccccctgcaagaactggaggtgactcttccaaggacacacatgaccctcacttcactgcatgattggtggggaggaacttgccatatgactttataagctcttgtatcatttgactgttttttgtcacatctagcctataccacttttatatttcaaaaactgacttacgggccgggcatagtggctcacgcctgtaatcccagcactttgggaggctgatcacttgagctcaggagttcaagaccagcccgggcaacatggtgaaacccccgtctctacaaaaattacagatataagccaggggtggtggtgcatgcctgtgatcccagctacctggatggctgaggcaggagaatcacttgaacccaggaggcagagactgcagcgagccgaggtccctacactgcactccagcttgggcaacaaaatgagaccctgtctcaaaaaataaaataaaaaaataaaaactgacttatgaaaagttgaaagaggaagaaacacctttgagtcagctcacaagatgctctccctgcttcctaagtcctggatacatccacccacccacagcacaggatggagagaagtggttgcggccttctgccaccaggcgagatgtgcgtcctgaccccacaggagcagacgtgtgggccaagaccacccttgtgggcgttattgcagcctgttaatccctccttcccaggaaggggtatggtgggagggcccagaaagcagggctgggggtagaggtggccccttctgtccacacgccatgaggtcgttcccactctccagcacttgaccgtttagtaaaaacgatgagctgaaaaaccacatgcaataaacaagaaggagcagccaacaaaatctcttaaaatctcagaaatgttcaataaacatttgcagagcgagaaaataaataacatcgcaaaggagccagtggctcctcttttccccgcatgttccttgggtcaggggtgcatgtgtctcactagaagtcacatgtattaaaagcaggtgagttccagctctctacaaccccactggcccccacccaaatgctcccaacgggtccctgacaccctcgctggtagctcctgcctttgataagctcctctagcctcaactgcttcttgatcctggctcccttcccagacaggctgcccagaaccctggttcatctgctcactggagccgctttgccagccagccagagaccccctcccagccatggcctaaagagccaacagctgggaacttgggctcatccccagctgcgtctggtcggcttggcggccaactggaaaacccagggcctccatggcgctctggacagaggaggccccgatcccagccccggctgccagccaatgccagcctgtccacttgacagaaaaacacacgctggccgcctgccccagggtgtttccagaagagaaatttaatctaatttacatacttctaggtacatcgataaccaaaatgtggccactgaaaaaagttaaaaggtcaatcagctcctggcttctagctggcccaggattgcaaaataaaaagatccacgttccttattctctacacaaaacgcgtttttaaaaaagtgaaaggtctagggagctatacatagaaagcaacagtgaaaagggagagggagcaggagtgggggaggagagtcccaccccccaaccccaccctccagggccccagagcccctgaggctctttggggggccttgacatggcaggaggcagctgtcagctctgagctcttcccagctgggaaggcccctctcgggggcagccaacaaggatttccgtggcattgtgggctcagtggggggctcccaggccccagcaggccccacagagggagcgtggcttcccctgagcaagcaccgtggcatgatgtggtcgttcaacccaggaactgggggtccggggcaggtcccgggtctcacgaggtgcgtgttgtgtgtgttcgcatgtacatgtgtgtgagaggatattcatgggggagagagggaaccagaacaggggtctttggggtctttgcaaatggccacggatggcagacatcgccctgcctggctgctagacgggggagtgctgtcctcccctgtgaccagaccggctgccatcagagacctggctgctgcccctgctggaccaggtgggcatgggctgaaggaagacaccctgtggccccagagtcctcgggctgggggaagggcagctagctggctcccggcgccctggctgtagtgtgcccggcccccaaggggcgccggtttgaggttttggcttgctcctttggaaacggaaagaaagaggaagagggacaaggacacagaggaggaagaagaggagacagaggtggcacgagaggggatctggaatgcttttgtgttagggagcctctgccgccgctgtctgtgcctgcggggcctgggactcctcaggtggggggtccgctttggagaagttcatctccaggatgtgccgctgtaagtgccgcacccactcttcctggatggagagggggccctggaattccacctcacagaacctgcatgggggaacagagagagggagtggccagtgctgtgaggagaggcggaagcatagccttgccagcatccctgggcacacctgctgctactcagtgtggacagagccagcccaggaggcgggggaagagggacccagaagtcaggcgtttcccatggacagccacctccactcaccatggggtcatggcagggtctcacagagacccctgcctctgtgctcagaagtcactggtgccaggtaagggctactggcttccaggtacccctgccatctggcagatacatagaatctgagacagtagagggcacagagaagcaaatcctacccaacgcaccaagccccccacctcctcctgtcttcctggcacctaaaaaggcctcacagcacagaggcctggagcccaagctccatggctcaagacgtggctttgactctgacttctgacttggcctgtatggcctcaggcaagtcacctcacgtctcagagtcccagttcgctgctcttcaatgtacttgtggactttggtaagaattaactaagatctacttttttcttgagccagacactagttgagtgcttacttaccatgtgccaggcagttctgagtgctttataaatattaaattcacttactcctcgtaacaaatctgtaaggtaggtttgttatcaacccgcttttatgagtgaggaaattgaggtaaggagcaggtaagtccttccctgaggtcactaagctggtaagtggcagagttgggatttgaacccaggtctcgcaggctacaaagctcagggtgtcagcctttagcctgagccccaccacacccaagggcagccactgaggcgacacctcccagcttccaccaaaccctatcctgttccaaggctccgggtgaccaaggtccactcaggtggtctccctccctcccccaggggcagcctacctgcatttgagggtgtagatgttgcccacgaacttgacaagtgatgtctgggggggccggggcaccagggaggggactggccggactcggggtgggggttgccgcacctcctccagcttctgctgtaggtcattggtgtcctcgcctccccgggctgcggaggcatctggagggcgggcttgtcggcgttcaaattctaaggtggagagggggacgggagatgagtgggaggggtggatgctgcagagacttggaatacacaagagctgaggactgatgctacctggatgggtgggatgggggatggatgggtgaatgggtaagcaactggagaaaggacttaagggccacagcagagcgcctggggagtggctgggtgggcctgacaggtgcccgctgcgctcccgaccctcctccaccaagcactcactgttgatgttctgccgctggtgctcctcagccttcacggtgcctggcgggctggctgccagaggccgctcaccaccgtcggctgcccggccagcctcgggccctggctcccctccggcactgcggccgaccacggccaggcccccgggtgccagccccagggacggccgcttgtcactgtcacggccatggccggcactgcggaacttcttggtgaaggggcggccgccctggatgtagctgcggtaggcgcccaccttctggggccggtgtttgatccactcgctcagtgtctcgatgggcgagccattgacgcaccactcggtcacgccgaactgccgcaggtgtgcccgtgcgtggctggccagggccttgcggttttcaaagtaaaggccacacagctcgcagcaggcctcggtggctgcggggcggagggggtgctgctgagtcacagcccaaagggggcaggtgcacccagatggccctgcccaggccaggtgccaatcccgcctcccacacagacccagccatgggggccccacttggggtcagtgtgcacgcttgtggcattgcctggcctggcaggccctggcggtcgccctcccaggaccctgccgcccgctgcttacaggagtgggaggtcttctcatgaagggtctttgccttgaagggcagttcagtctggatgtaggtcttggccttgacctctgctgggaggaggcggtcctcctgcaggggccgcttggctgccactgagcccaggtagccagtggctgagggcttggccccagtgatgggcgtcaggctgagctcacgaggaacctgggccggccctgcacctggtttgcctggccggccagccaggggcgacagcggcagtggggactgcacgggcccaggggccacggtgggaggcccgtcctcagccagggcaggggccaggtctccagccggtggctccttcttgatgaggcacggcttggacttcttcttgaggatctctcgcagtgtgtcgatgggcgaaccattgacggaccactcggtcacacccatctgccgcaggtgtgagcgcgcgtgactcgacaggcccttgcggttctcgaagaactcgccgcagaactcacagcggatgtcgcgcaccggctctgcccgggacgctgcaggggatccagggtagggggaaggaggaggaggaggaggaggagggaggaggagggaggaggagggaggaggaggagggaggagggaggaggaggaggaggaggaggaggaggaggaggaggaggaggaggaggaggaggagaaggaggcggcggctgcgggcaggaagcctccaagctcaaagcccccgtatcagtgccagctgcctagctacccctgtccacaccacccaccagaccgcaacaacctgctccctcatctgggcttccagaggcccttttaacatctggctcttctgcttgttctgtcacttcaaattctagctggcttcaagatacctccctgtatgatcctgggcaagtcactttccctctctgagcctgtttcctccgctgcaaaatggagatgaaaacccctacctcccagtgttactttgggacggtctaaaatgggaacagctctcagcatggggcacagagctggtacacaacacacgtgagcgctaaggcacaagcctgggctgccctcacctgctcagcacacagtgggcatccaatcaacctgagcagaatgaacacagtgctggtgtgacaggcaagcgagcaagtgacattacaatgatggcatacagagttttctgtaaccaggtgctgtgctaagtgctttatcccacttaatcctcaagaaaaccagacagagttgggactatgctgatctccatcttccaaatgaggaaacttgcccaaggtcacataaagctagactgtggaggaacagagatcttaactcacacttgactcccaatgtcaagcacttaattaccaaaaatgtcagaaagacacagttcagacgttcactgccagtccctacgctcctgctgtagcagacatcactaatggatccccgcagtctttctccctaggagtctggctggcagccactaccaatcgattgaaatggcacaagagatggaatctttctgctgtcactgaatgacacaatcctgcttctcaaatgaataaaggacaattgagcagcagctcagttgcaggggtctgcatagcaggaatacacagctaaccctgtgtcctctctacctgcgtgtcctcccttccaattcaaccctaggcactctggatacccccaaggggaggcagggaggagacccctccaactgttctccctgccctactgcagggtcacacttacacaggttcaggggtgtcatgtcttcccgtggtgccccccagggaccctcagatgggtgcagttccccatgaagggcccccggcagcatctcccgcttgatctccacccgtatttgttcaggcttcagcttcttgggcaaggagggtgcagccaggcctgggaacatctttcgggccgtaggaggaggagaggcagttggtgagtggcccagggggctgcccggtggtggtggcaacttcttggccaagggtgagatgtgaaggtccgaggggctgcgggcttccagtgagctgccaggacctgcgccgcccatcatcttggccagggcttttgggcttggccctggtgggttgggaggtccaccaggccgagactgggtccgtctcttcaggatctcccgcagcgtgtcgatgggcgagccattgacgtaccactcggtcacgcccatttgccgcagatgggagcgcgcgtggctcgagaggcccttgcggttctcgaagaactcaccacagaactcgcagcggatgtctcgtgctggctctgggcctgaggctgcagcaggaggagaaaggggcagttagcatcgtggaactgccagcatggtcacctgcaggagtgtcctggtcggctgggcgtgggcggcagcagcacgcccacaggttagggtggtgagggcaggtgcaggtaagggagtggaggagcggggctgggggccagatacccggcaggagtgaggggaggctccagagagcacatgggccctcagtcctggcggaggaggatggaaccaagattccattgctctgtgggtcccaacaaggacagggtgaggcagggaggcagcctaggtgctatgtgccatccagacaggggcagatgtgggtgctctgcacactaaaaggcaggatctccccaccttggccttcattctcaggaagggtcatggaggtcaaaggccaagagagagggcctagcagcccactgccaacaagatctctgggcagaaccggcccactgccaagggcccctgtctactccctgccccagcagggagggggctgtgaccccccccccgggaggggctccagggcccgcagtgaggagggggcagctgaagcgagaacctacagaggttgagaggagacggctccacatcagaggcccagaaaatgccggcggctgcggcggccgagaggtcctgcttcccccaggggctggccatacccgcggccttcagcttggccttcttggccggcggtggggggggaagcaaggagagggccgcggaggtgggaggcggccgccccgggtgggccagggcgccgcgcctgggtgggaggcggatctggacgccgtccctcctgatgagcccgtggagcacgtctatgggggatcccttggcgtccggatcgctgacgcccaggtggcgcaggtgggcacgggcgtggctagacaggcccttgcgggtctcaaaccaggcaccgcacagctggcagtccagctctctgcccccgtcactatctaaagctgcggagacaaaacacagggggggttcacggccgccaccttggccggccttgggggcctgaggtaggagggtctggtgtgatttttggctgctcaggcagttggggggtccaagactcaggccgcagatttcttttgaagtttgggaagcaggacatcctgtttcctgcctagccctttggcatcgaggggagtgtagagagcttaaggactttgggtagacaggcagtgaccaaattctaggtaatcagatactcccagaccctctcccctaggatccctgctatgggagctatttgggggcgatggtggctgctgggctcacgcagccaagggcacacctgctcaaggccctgcccctggaagcacggcagactcagtggaagcaacttcaagggaacataaggtgccaaatggggggctccattgggcagggggtgagaccctggggtcacccccagactctaatgtccacaaagatatgggaaagcctgatgttgtaagggacgtccttgttaaacctgctcactgcacctggagggtttcttcccaaaccctgcctgccgtgcccacaggcagcccaggaggtggggcttcaccggcaggcgcagagagctgcctctgcgtggtggacagccaggaagacttgatgacaggaccaatcgtgggcacctcccatcaggtgatcccctgtctatccaagatgcttccaactaccactgagaaagctaggccacaggaaccctggttaccttcaccgcccctacccacaggcccagagaaagccaagagctgcccctcagtggcgagcatgaccctggcaggctcatcagccgcagtgaggctttcaggggaagatcagcaaagtaaagtgggaggcacgatccacatccaaggcggcccaaaaggagatgcagaggcttgaccaatactctggcctggctggcccaggacatgggagctgtagtccccaccgcccccacccaccctgggccctgtccctgggctacagcccaacctgaggtcccgaccctcccagcgccagaacctccctcggctcttgggacccacactcactgaggttcaagggcccctcatcctcagactgaggccactgtgcctttggggaggccggccgggggctcagggacagctgggggctcttgtcctcaggattcttaggggtaggggagcccgccagggccagtggtgtctttttgaggagtggagagctgggcgggtggcccaggcccttggccgagaagccgggaggcgacttgatggctttgttgacagcaggggcatccaagggcttggccaggctgagcaagccgggccggggggccccggcgaccacctccttcagtgagctggacttcttagccaggcctgggggcagcccaaggtgggcgtcaggcagacccttctgcttcacaagctcgtagaggaggtcgatgggtgcgccgctgctttccgactctgccactcccagctgccgcaggtgggagcgcgcgtggctggacaggccctttcgggtctcaaagcaggcaccgcagacctcgcaggtggtcaggctctgggctgaagggcaacacagaggccgggagagcaggctgtgaggcccacggcccagctctcccgcttctcctcccctgagagtcccactcacccaggctccatggaagtgttttgcctccgtcaggccccccaaacctcacaatgaccctaacaacgcagagaatagcttggctgctttgccaataagggttagaaactgagactcagagagggaaaagttgtgcccaagggcacacagcaggagatagagcccttctgtcatccagccagtgggacacctttcacaacctttcaggcctacggggtgccctggcaacaggttcacacaaacgctgacctgacagccacatgcctcactgaactaagttctaaccaccctctgtggctcaactcctgcccgaaacactggtccttgcagtctcctgcaccctcttccacagagcctttatccttgcctatctgcttctctgtctccccgttccccaacttgaatggccctcaagagcaagggccaaattcattttgctcctctcacctccctggagtccaccccagggcccgtcactagtcaataacaaccttaggatcaacagacgaagaaatggtgtcatgcgagagactgcacagctagcaaaggccagattcagcaaatgagctgggtctgagtatgagctctggaccaccacacccactgcttctggatgctgtccctcgccccgtgagggtgcagctcagggccacgcatgcccaggacagtagaagttcaagagagaagacagctgagtgccaaccttggtgcctcaaggtgccagagggaaaactgcgggcaaccttgggccccacattaaccccaaggcacgagagtgctcctgtgagtgtaaccagcctggccagcatcccctgccatgccacctgggccactcacccttgaggtcctgcagctcctgtttgctgccatgaggaacctctgcagccactttgctgctcagccgactggccacctgctccagggccccagggacaggcaggctcttcttagggagcgagggagagcccaagtccatggccaccattgcgttttcctcagaacccaggcctgtgggttggggagacaggctcagcccagacaaatttcaggctgtctatacccagaactaagaagatggccttcttccttatccttgatgtccgctctcactctgcgaagcgactcaccccaggaaagctgaggttccaccataacccccagcaccagtccagtgcagggacactgaggctgccactgacagcagacgccagcagctgcttccacacactacagcatggacaggtctggggtctaatgcaaatctgagcccaaactcccatcccaggggatctcaaagaaaagatctctctgggcagaacttgtgagggggaacgtctgcctgtctcgagggtgagggtgggaggcactcagagagggaattcaacacaacaccagggtcaggaggctggagaggccacacagaggcagggagccagggagccagggacagggaggtggcttcacagcacttgtgaggaatctccaccagacaagacagctggggctgcagagacaatgggggaccaggggtggcctactgatcacaagctgggccctaagtggggtaaggtgtctgcacctacagctatctgacttcggacagaaagagttggaatcacagaactttgtgttaagtttctgagacatctatcaggcccgcagcatccctgggtgaggagtgtgtggcagagggaaccaagggtgaattttcacgtctagttgttcaaaggggcctgggaggccagttgaactccaaatttagagttcagagcaaaggatgaaggaactgtgccaaatggggccttggaggcgttcagtgggatgtaacggggcagggggccatgtaggttctatgctcagtttgagtctcgcagaagcaaagagtaggcgctgaggactggggcaccgaggactttgtcaaagtctccgggtcgggtgggcgcgtctgtcagatggggcagggctgaagtgagtttccgcaccggacggaccggaaccgtggcaagggacgctcccggggctccaaagggggcaagggacatctgtcagacggggcaaaggtctcgaggagcggcggaggagtgtttctgaggcctgggaccctgcgagcggcgacagaaggccctgggcccacacaactaaagggcctgggggaggggggggtcccgcagactggacggaaggcgtcgggggcggcggcaccggcaggcgggattccgaccttcccctccccacaccctcccaagcgcgggctcttaccgggcgcgggagcggacgcgggcccgggccccggctccggctcggccttgggcccgtcccgcggcggcggtggcggtggcggtggtggtggcggcggcggcgggggtgggggcggcggcggcggcgcggggggtgccgcggggcccgggctcggggggctgggcgggggcgcccccgcgggcgcgcgctcccgggcgccccccgcgcgcggccccgccgccgccttgctctccgcttttgtcactcggcactgggcggtggaggcggccatcttggctccggcgcacgcggggcggccgccccaggcgggagcagctgagcgccgagtgccgagtgccgctgccgccgccgccaaacccgctccgccccgcccctcagggcgcgcccaggttggcctgccgagtgccgagcgccgagcgccgagtgccacgagcgaaaccgttcgtctgggccctgagggcggacggctgcagctgctggaagcttgtcgcgcgccctggctagcggatgcacccacgctgggcgcccagcggcctctaaccgccgccccagcccagtccccggacatctctatccctaggatgggaatcttccggcctcactcagacccccttaaacaacgtcaaaactcttaagagccccgacgggcggagctaggacctgccctaggaccctgccccattccctttccggaaagtctccatctccgagtcggggatcctggaaaacacctgatctccaaccacaagaatccctccagtatcatcctgttatccaaccgtcccccgacggtgccgttccgcagacctagggaaccccacaaggccggcaacacatttcaatcaccgcctgcttctctctccgattgtccccagctgttccttgacagttgggtggggctagaatcggaacattgccccgcccccaacctggcacccgccccctcctgcccacttagggagagggggcaggcttctaacgacagccttgcagcgccagtgcccagacctagccctaatgttgcatatccttacttaaggcaaggcttccaagatcttcccaatcactccctaaccgccaaccctctgcctcgcagttattcactgaaagactggtcatagctctccctcccaaggacaaggccagggcagtgccaaacctggctcctctcatccgtaggctgattccttataccccagtgcctcctgcacccctagccatcctcagagccagctctgtctcgcagccacccctgagacactacaagccagacgtgggtgagctgagtgcctggggagcagcctttagcagaagcaagaagcctgaggtcaagtccccactctgccccttcctgaggtgtcacctcaaccagcccctgtcctctctgaacctccaaggagagggggctttgatagccccaccctcccctttgcaggctcatgaatgcccttcaagtgggcttgtgagtgggtctgactgagcccagagtacagatctaggtaggaccccagcagctgcaagtaggaatagtaccgaaggggccgggtgcggtggctaacgcctgtaatcccagcactttgggaggccaagaggggtggatcacttgaggtcaggagtttgagaccagcctggacaacatggtgaaaccccatctctactaaaaatacaaaaaaaattagctgggcatggtggtgggcgcctgtaatcccagctacttgggaggctgaggcaggagaattgctttaacccgggaggcggaggttgcagtgagccaagatcgtgccactgcactccagcttgggcgacagagcaggactccatctttaaaaaaaaaaaaaaaaaaaagggccaggcgtggtggcttacacctgtaatcctagcactttgggaggccgaggcgggcggatcacaaggtcaggagatcgagaccgtgctggctaacacggtgaaaccctgtctctactaaacaaaatacaaaaattagccgggcgtggtggcaggcacctgtagtcccagctactcgggaggctgaggcagaagaatggtgtgaacccaggaggtggagcttgtagtgagccgagatcgtgccactgcactccagcctgggcgacagagcgatactccatctcaagacagagcgagactccatctcaaaaaaaaaaaaaaaaagaaggaatagtatcaaaggaagccccagcctccagcagtcccaggggcgataccccctgttcagacactctccattcctcagagcccaactactttttgtagccaagttctctgccttgtaaaggctcgtgcaaagccaggctgtgcaagactgggcccttcacttgtccactccctttgcagtgcccagtcctgggctccttcaccaaataggacttatggatttccaagccatcctccactagagacaccaccaaacaagctgctcagaagtctagctctacagctgtgtggctgtggcaaagaagatgacctatggtttccttatccttaaaacagggacatggccggtgcggtggctcacacctgtaatcccagcactttgggaggacgaggcaggcggatcacgaggtcaggagatagacaccatcctggctaacatagtgaaacctcgtcactactaaaaattagccaggtgtggtggcacgccctgtaatcccagctactcaggagtctgaggcaggagaatcgcttgaacctgggcagcggaggctgcagtgagccgagatggcaccactgcactccagcctgggcgacagagtgagactctgcctcaaaccaaccaacaaacaaaaaaaaacagaaacacagcaatcttagttgtacagacttacattgaggcataaatgagatttaacacgttaaaatcttagtacaggggccaggcgtgatggctcaggcctctaaatccctgcactttgggaggctgaggcaggaggattgcttgagcccaggagttccagaccagcttgggcaacacagcaagaccccgtctcaaaaaaataaaaaattaaaattaaaaaaccttagtacatagcaagcatttgataatggagtagcatatcaggtctgccggataaagcaaacattggttgaaaatctagactctaggccgggtgcagtggcttacgcctgtaatcccagcactttgggaggccgaagcgggcagatcacttgaggtcaggagtttgaaaccagcctggccaacgtggtgaaaccgtctctactaaaaatacaaaaattagccaggcgtggtggtgcacgcctgtaatcccagctactcagcaggagaatcgctggaacctgggagttggaggttgcagtgactgagatcgcaccactgcattccagcctgggtggcagagtgagacttcatctcagaaaaaatctagcctctaggctgggcacagtagctcacgcctgtaatcccagctctttgggggcctgaggcaggcggatcactggaaggcaggagtttgagaccagcctggccaacatggtgaaaacccatctctactaaaaatacaaaagttagctgggcgtggtgatgagcgcctgtaatcccagctactcaggaggctgaggcaggagaatcacttgaaccccggaggcggaggttgcagtgagccaagattgtgccactgagctccagccggggcaaaagagcgagactccatctcgaaaaaaaagaaaatctagactctagatctgcactatccaataggatccccactagcctggcactagcttcatttcaacttcttaacagccatacatgaccaatggtgtccctgtaagacgtgcagatatctagagaatatttccagccatcatctcagaaagttctatacaacaatgcttctcaagatagaagatgtcattaacagcaaagaatctggggcccagctgcctgggttttaaatccctgtttcaccctttccagctgtgtgacctcaggcaggttaattaaactctgtgcctcagtttcctcatctgtaaagtggaagaaataataacacctgccttataggattgttgtgaggatgtaaatgagttcatgtttgtaaagtgcttagaacgatgcctggctcccagtaaaagctcagtaagcatttgtcaaagtcactggcaggaaagatagtgaaaaactggatccagaaagagacctggcccagatcctgagtgaaacagaaaggacacctaaatagcagggtggttgtaaggaaagtcatcaacatactttgtaaagtgactcaaaatgcttccaggaaagctgagcggctgcccctccagccccgcccctccaatgctctgggcccctgggaaggatggggctccagcacagcccgtcccctccccttaccatctccataggctggcccagggtcctcagcccaggtgggtggaaagggcaccgtgagaggtaagcggggccgacgggaggtcaggaagctgccaggcggacccccaggctctcggcccagggggctggggggctgctcagcagcagaggtggccagcagctcctgcaggatgttgatgggtgagacagtgagctcccagttggtgataccgaagtcacgtaggtgggcccgggcgtggctggagaggccggcccgtgtgtcgaagccagccccgcagaagtcacagcgcatcaggctgaaggtgcctgggtcaaagttggccactgtggagagaggacaggactgcctgaggtggagagggggctactccccagccccaacccctccccatattcagggcttcaccctggactgcctttcttccccgtggctgtcccttttgctcctgcctgctcctcagctctcagctcgtgcatcctcccaccccattccaggaagcctgaccctcccagatacccccttcccacatctggcaacgtcaaggagggacctcttctgcaaaaacccttctccagggccaggtgtggtggctcacgcctgtaatcccagctctttgggaggccaagcgggaagatctcttgagcccaggagtttgacaccagtctgggcaacatagtgagaccccatctctataaaaaaattagctgggcatagtggtgcgtgcctgtagtcccagctacttgggaggctaaggtgggaggattgcttgagcttaggagtttgaggctgcagtgagctataattgccccatggcactccagcctgggcaacagagcaagaccctgtctcttaaaaagagaaagaaagaaaaagaaatgcttctccagttgtggacctgccatcatctatgagagtatttgattaatagccttctcgtgactatttttactcatgatcacgcaagtgctgtaaattaaatatttgttggatgaagaaatggacaaatggatgtaatgccctctgctgggagccttctctgagccctgcaactggagttagggactttgtctcagcttccccagcctcctggttctcccagctttccccgcatctcagccctgctcactcggtgtcgtcactgcctggtttcctggttgtcaccccttgcccccaacccctagtgcgtagacacacacacacacacacgcacacacacacactcaaacaccatactggcacctccccaagtgggctttgtgtctgccaatgtcagaaccacccagggtgctcctgttggaaacagacttctggaatcagagccttgtactgtgggaactgacaaaccttacaggcagccccagggggttctgaagctggccagtgtggggtggagggggtcccaccactcctggactgggccatgaactccaagagtccaagaactgctattctgtccactgctgtgtccccaggtccccagaacagaggggaaccttgctcagtaaatatttgttgaatggaggaatgaatgaaattctctgcctgaggctgactcttctacccacactccttcctccagtggctggaatggccaggggactggggcgtctccacacatccaccgaccaggtggccttcactgtggctctcaagtctctcaggagcagaggccccagtgtccccctgcttggcgctaagggagagaatttagatcaacggtgggttgcccagccatgtgtctcctgggcctttaaaagtgaagctgccctaccttttttcttcttcttctggaaggagaacctgcgctcaatggccttcacctcctcagcggagatgaaatggcgcacattgtagctgacgcccacgcggttcaggtggccccggacgtggttggccaagccgatgccgttgtggaagcgatcggggcagtaggggcatttccgctcctcgtgcttcagtgccatggccggatccccatccaggagtgtgtccagccccagcgggccgcccagcggcgcgtccaggagcaggaagtccagggggtgggcgcctgccagccccagctcctcgggctgcaaccttgggggcaccctggctgccgccatgacctgcggccccagcttcgccacgagcacaatgggtaccatccctcggagctgctgctgctgcccctgggtggcctctactgcctgcagggcctctcggaatgcctgcttcagctccagggccgcctgcgggatgaggctgggggtggctaggggtgaaaagaccccattttcaggggaaaaatccatctcggaggtcagcactacatcctcctcctcctcctcctcctcctcctcttcgctccaagggcgcctccgttcccccagcccttgtgggtggacggtgcttttgtttctcccgagctgtaaggagtagggggtggatgctagtgtggagggaaaggccagccttccgagaggcctctggcccgtgccatgcaggagtggctttgacagcgggaaatctctgatgctcagctgctggcatcctgggccaaaggccaggctggggtcgtatccagcagggttctcccgccacatgggggccaaggacggctcagctttgccaaagtagtccacagcagtgtcagggaagcaggcgtgagcatcctggctagtgcctggctggctggcagggtcttcctcataagcctcgccatcctcctcccagtggggatgggcatgcaccagcctcacgtgctccctgagcaggctctcgctgggcgcggggaaaccacagaagacacaggcgctgaggccaacggcagctccgtagggctgatagaggagggcgctggcctcagggctggggctgccagccccgctgctgcctccaaaaggctctttggtggtctggcctgggggctcacgcatgtgcagcttggcatgctgcacataggccctggatgaattggtgccaaagacacacttagggcactgcagccgtgcctcccggccctcgtctcctggaacttgcttcagcttttggatctcctcaatgatcttctcccgggaggcctgatgcagctgccggtgctgctccagggcagtggggtcagcaaaggcccagccacactccccgcaggccagcggggccaggtccgcagggggctcctggcccggggctcggcggtgctggctcatgtgctccaggaggtgctccttctgcttgaagtagatgctgcactcgatgcatgggaacacggccggctcctcgtcctcgtcctcatctgggctggccaccccttcggccacctcctccagcagctcacacaggtagggcccggtccggatcgggggcagtagcggctgcagccgctccacagaagcctccgagttcactgtccaggtctgtgtggctacctccgaggctgacgtgggtaggccccactcggacggctgggccagcccctccaggtcctccagatcttctctgccacccaccaccgccatgtccagcgtcttcggggtgtcttccactggcacaaacaccctcctgaagggggcgaggggtggcggctgggcaggcaggtccaagtgcagccctgcgtcctggggggatccctgctcgtcctcatcttggagccagtcgaacctggggcggccctgggcatgtttctccaaaagccttggttccccccggtggtgtaagaaccttctagagccctctagctcagcgtggggtttcatggttctcacaatgactgagtcctcgaatctccgctcagataggatgccctccccagcctcctggacaagggggtgctcccagggcccccggccatcaggggtacctgggaaatggcccaggagatggggtggtggggagcccggccggaagtccaggctgcctccatcccagcagctgcaaggaagtgccaatggggacaggttagccatgggctgcagttttccttcctagggtggtgatgggggtcctcccaggccgtttgaagcaggccccggagatccagcccgagggtgacaggggtgtgggggtgagggtgggaggtagggggagtccacgtggatccttccggacctatcgggtcaaaagccaggttcaactcctaggatgcacctgtccacaaagcctagccccgctgcattgtgggggaatgtacggagaccacccctgggccacacggggatgtggccacctctaagaagtctggtggcaacagtcaactctcatctctccccagggaggacccaagcctctcatctgtgctccaggctgcttctgtcttggttctccccaaactggggtgattttgctaatttagtttcacctctcccccagatttggcgattaactttgtggcagaacagttcaaaggaatgttccttttccctgcatctccccctccagaaaggcagagtcaggagaggttgaaggtccctgctaagcctttggccccagtgatcctgaccttcttgggcagaggggtgggagtggggctgggggaggcaaggtaaccactctgggcctcagttttccaatcctgaaattgggggtaattcccaagaactgggaacccctttgtccttatacaacatctgtggagctttctcatagccatcatcaacaaaaggtgcttgcaacacaaggcaggtgcttctttaaatgctcacaaccacaacctttcaatgaccccgcagggtgtagggtgaagatgacacaactcagtgcttgagaaatgctttgtttcacctcatgcctggcccagtgtgggttcttattatgaccatttgagatcggttctcccttccttttcaagatcctgcctccatcaggggatgccaatcacgcttatggaacagatgtggaaatgttccattcagatgttgggtggagaccataaggtcacctttctaagctccatcactgacatgcgatactaaaaggaccatcctcctggggctgtggcaaggattcagtggggataaacacatgttcagagtgtagctcatagcagctattattaattaattaataatattcttgctcattctgagagctattagtaatcctgataaacttactatgacctggccaggcatggtggctcatgcctgtaatcccacctctttgggaggctgaggtgggtggatcacctgagatcaggagttctcgaccagcctgaccaatatggtgaaaccccatctctactaaaaatacaaaaactatctgggcatggtggcaggtgcctataatcccagctactggggaagctgaggcaggagaatcgcttgaacccaggaggtggaggttgcagtgagccaagatcacgccactgcactccagcctgggcgatagagtgagactttctcaaaaaaaaaaaaaaaagatgactatgacttattagcacctgccaagccatttaataaagagtagggaccatcagcattgctcttgattcctgctctcacccaatgccccttggatcctcaaggcgaattcatgagatgcatcttatggactccattttgcagatgagaaaactgaggcccagagaggcctagtatcattctaagggtcacctggcagagagaggacttgaagggtccaacatccaggctcctgcccctctggccctgctcctggcagggataatgagagttgaccctctgtgttcattccagacctcccccaaccccagcacacgcccaggggcttgcctgccgggagctgactcctcctcctgcctggcctcctgattccctcctgtccccttctcattccccaggggcttatctgaggcctgggcatgtcctgcttgcccccctgccctccctgaggtcagggccagcatggcactcaccagctgctgatccgatgggtggcggaggtgacacgggggagggcttcgctgaggccgggatggggctgcccgtctgcaacagagaggggagaccctgaggggctggggtccccctggccggggccctccacaccccagctccaggagccctgccaggtgcctcagaaaggccctgctggctcccagttcctctccctgagaggcccgtggcctctgtggtcctgagccctgaaaggggtttctttggaagagtccccttggctctcctgggggaccccagggccttgctgccttccaaccctcctctctttcccccaacccagcagccagggtggttttttacaagcctcaccctggtaaaaactcacctggcttctcattatacctataataaaaaccagacttctattttttgagacggagtcttgctctgttgcccaggctggagtgcaatggcacaatctcggctcactgcaacctctgcctcctgggttcaagcgattctcctaccttagcctcctgagtagctggaattacaggcgtgtgccaccatgcctgggtaattcttctatgtttagtagtgacggcgtttcgccatgttggccaggctggtctcaaactcttgacctcaagcgatccacccacctcggcctcccaaagtgctaagattacaggtgtgagccactgtgcccggcctaaaaaccagactcttagccgccacctacaaggccctatgaggtcagacctctgctggtctctccaacttcccctctctctcctggcccttcaatgcctccattctgactgtatgggcctcctcaggaagccccaagcccacctaactcttttgggcctcagggcctttgcacctgctatgccttctgcccagggcactcatctctgaccgcctaactcaaatgagcccctatgattttctctctcagcacctgtttcatttctttcttagaactttctgaaatcacctggctctttcttgggatgactgcttgctgggtcccctactagcatgtagtcacagtagaccaggtactttgtcggcttcgttcactgcagcattctagcacctggcatggagcaagtgctcagcaaatccttgccagatgatgaacgaggcacctgttctaacctgagctgcagagagcccatccctgccttctgcaccctctcccaggcctatgtcctgaaatccaatcccctcctgggaccccctccccaccaacacagatggagccaactctctattatccgcctgtggagccaatgcctggagcgaccacaggaatcctggcctgcatctctgcccgccacacttgcctgacgtgggtaagcttgccaatcggggagcaggccaattgcccgggccaaggttaacacactgggggaacttgtgccccgtccagagcccgacagatgcaattgttggattagcctcaatttgaggatggtccagaaaaagggatagggctggggcgaattctttttccaatccctcatcatccaattggcccgagaaattgagagctgactgctgagagtcaagggataaaagtggaggtagggtggggagagggtgttgaccagaaaggtgtggtcactggctgagggtccttcttctgaacccaagaaaagggttgtgactgttgtgtgacctctggaaggggtggtgggggtatggaaatttgcatcatctacagcgcaaggtgtctcaacatcagcaccattggcatttggggccagatcattttctggggtggggtccatcctgtgcattgcagaatggtgagcagcatccttggcctccacacctccccagccctcggtcatgacaaccaaaattgtcaccaaacattaccaaagtgtcccctggagggggaggcgaatcacccccatttgagaaccaccaggatacactgatgggcagcagagctgtgcctgggtgcaagggctggttttaggatgggggtgttggagagggcgttcagagttgggaaagaaaggcctggcccagccaagaaacaggggctctagagaacatgtgagtcatagatttgacttttttcaggagagggcagccggttcacatataacctgccctagcatgacctagaggtgtgggtctgagggtcccgggcatcctgcttttgaggttctaggaccccaagctcccaagattccgggcgtcccagatttgatgattctgcgattgctgttgtctaagaattccaagagccaggggaccgcgtggcctctttgtctgagcaattccagcgaggctcctatttttagtggcagtgactttggaggaagcaggccaagcagtgccctgtgtccaagacaccttgggggtgggggcttcacccagaggcctccacagttgatggggatccaggagtccctacgggtcagatgaggcgctaggtcgcagcccttaggcagtggccatgccaaggggcccttgttggctcctgccatctgggttccccgagagagtttgcaaatgctgatggcaaggggtgtccataagcagcctgaactccaagcctggggttcaacttggtagagtggccaagaacctagattctggagccagacagatccgagttcaataccccaggggtgccctgaagggcgtgcctctcccactccgagccttggtttcttccgctgtgcaatgggaacagccaccgacccagtctcgcagggccagcaatgggtgccagcaagattgtagtaaatgctccatccagagaagtggcggtggaggggaagaaggctggtgggaggcctgggggatcagggctggttcagcgatgtctcaagggggaagcttgaggctagaccccagagcctcaggtccggtcactccatgctctgattttctccccaggctggggcctcaagacagcagaaatgatatgtcatttgtccctgggtgccctgtccccaacacaatgccaggcatgtaccagactcttcatcgatccatacagaccacctcagcccctgagtcttttctgaacctgggaggcccaaccagagaggcaggagctgcagagggggtgtgggagctctgggtaaacagccgtaacgggggacagaggaggcagcgggcacacccctgcccaggcagggaagtttggaggtggccactccagtgtgctcttggggggctctgagggctgagtggggataaaggaaggcccaggctttggggtggaatagcagccccagagcctgttcctatttataggcatcacaagactagtagggcaggtgcccgtgtcccggagggggagatcaagcgggcagagagggcagtgggagagacgtggtgtcccaaacccaggcattcttccaacattcaggccatgacctcactccaagtcaagccattcctatccctgcccccagctgctgagggaaaccttcaagggtgggcctggcccccctcagcagccacatttctctcttccccaagctataaaacagatgcacgtatgagaccctgggtgattccccagtgggagtgaggatgcacctacctgcctgcttttcccctctccccagacctggggcatctgcgaggtagagaagagatgtccaatccctcggaaccagacccagagaggaccctgggatccctagagcctgtaccctcaggctcccacaaaatcaaagtccccgcccagccctggccggctgtgcgacctggcacaagattctgcctctctctgagcctcagttattaactcagttattaatggcttagaggaggggattgctaaagtttccctgagtgctgatactctggagttgggtgtaccctctgccctcaggggtctcaccttgccaccccactgcctgacacctgcagatgccaccagctacctctaagccttggcatgtacacagccccctgcctagatgcttgcttcccccttggtctggctcattgtccctcatcctacctctcacttcctgcaggaactcctggttgctccccaccaggtgctttcctcatcacagccccagccgctgtgtcataacacctggtgacataacaccgggtcataacacggtatcataacatctgtctccccagcctcagatggtggggtctatgagagcgaggatggtgtgtgctcagtcaccgctgtgccccagggcgtggcccctagaagatgctgtgtatttataaatatccgagcatcatgagttgtaaaggtggccagagcaggtcaaggatctgtgaggatgcagcagggtggttaagagtgagggctgtcaagccatgttactccctggctaggtgacgttgggcaacttatgtcaccgctcagggtctcagtttccccatctctgacacgggataataataatgaaggctattccacagggttctttggagaatgacagaagatgatcttgcaaaagccttggcacggaggaagcccttgatgaggtgtttggagatgggggtggggggtgtgatacatcagcccactgttttccaggcataccagcctcctaccaggtccttggacacgtcaggctcctccccaccacagggcctttgcactggctgttccctccacccagaatgcccgtcccaccattcactccatgctccattcaaatgccactctatcagggagggtctcccaggtctcccaggcatgatcctggcactctgtttaatgccttcacagcatctgtcactacctgtccttctgatatttgtttagttgcttgttgtccatttcccctactagagtgtcagccccttgagggcaggaattcttgcctctttggtttacagctgtcttcccagtgcctagcacataccctggcacaccgaaggtgctcagtatttaatgaatgaataacacgtctggaggtggggagagtgtgagatacctttttgctgggtaaaccaaggggtagccagcatcgctgactacccagcctctccctagccactacagaagctgttttggcccgtggttcaggaacaggatacacccagacagccagagggagctgggatagactgatgggagtggggaatacctgtggaataagtgggctgggggcagggagtctggggtgctgagatgggcctctggacccaattagtatgctcagaggaggaagccaggctgacctgagttcaagtcccagctccataccacccagtggggagccttggtctggtcactggctcccaggacacctgttttcacaactgtcaaataagaaactaaacagagtacaaagaaaaggctctggacccaagcggaatcagcatcccagctcagccgctgctgcgctgggtgacttgactctctctgagccttggggaatgggctggatgctccctgggggccacacggcccattctcttaccagagatgccacctctgccatccagaatgtctcgggggccctccttggtgacaggcaggtaacgggtggaccggaagatgccaccttccccctcagcagcttcggccccaccctcgatgttctcccttggcgccgggccaggcagtctctctgggccttggggacgatctggtgcagccaggctgcctgccagagacccctccatcggattttctctgcttggatccactcagctgctgcaccggctcagcggggcattgtgggcctggggatagagagaaggaagtgcttaggggatggaggaaagggaatctgcctcagtttcccatccctcaaaacctcagtcctcaactttgcagctcactgcctcagtttacctcccagcccaggggagctaatggtgttcagaccttttccacacaccttctatcccaatggcccctaccctcagcatgcctccgtctccccatcaataactcctcccctttatacagatcctgcactgcctcagtttacccatattgacacatgcacactcagccacctggtcttcttccatcaatcttaccatttctccagacgcctcccttcattcacacacagctgcactttccccagtcctgccctcacatccatgcacacgcacatcctactgccatgccttcgtttcctcggcaagaatcccagccacttgtacactctgatcctatacaccgtcaggagtctcccatcattacccctttacttttctccattgggttgtcccataccaatgatccctgcacttttcccacactccaacccttcccccacacaggaccttagggttctccagcattaaccccttcacccccctccacacacacagcctcaagtgaccccagcattaaccctttcgcttctccccaacattatccctcatgcatacccagcttgggctcctccattccccccaccccccaaccaagattgctctagtcctcgggcgaaagaaaacgatagggctcctggtccagaaatgaggaccctggggagcgggggttgtcctctctacctataaataccttcaaggtaacggcggaaagtgaagggcaggaatgaggcgccctccccagggagatggtggggaggccgggcccaggcaaccggggcggggccggggcgccaggcctggttgcaggcgctgccctcgggggcctggggattcccagggggctcctccgtgggctggcagtcttggtgggggtccctacccaggcccggaggaagcacctgcggttgtccactgggtgggcactgcccgcggggaacgggcgggaccgcaacttcggagcactttggcagcgtggggagggggctcctacccggacgccccccaggggtcgcagaggtgggggctgcgccgcgcgggcccactcctcgggggtccagggtccgggggatgagccctccgcccgtgcaccccggggcaggagaccccgcgggacgcgccgaggtaggggggacacctgccccaagacccccgcccctccccccacctgcacggccccgcccccggccaggccccgcccctgaaggccccgcccccgcccccgccccggggggtcccgcctggcccggcccggcccggggcctcccccgccccgctacggctccgccccacccgcgggctccccaggccgggccgggcctcaccggggaggcggcgccgccggccaggtgccggggctcggagctcccctccttggtgcggccgtcgctgccgctaccgccgctgccgctcccggtgccggtgccgcggcctccgcagccgccgccgcctccaccgctcgggggacattgtccctttaaatcgctccccccgccgccccgcccccccggcgcgccgccgtgacctcagcgcgacagccccgccgcgccgccatgatggggaggtccggggcgccccccccaccccacccccccccccctcgccgccccggggggggcggccagcgggcgcgccgccatgttgggagtggccaagcgggtcacccttaaagggcccgcacggcctgagtccagggagaggccccgttaccatgacaacacccttgtcgtcccacaccccaatggctccttatcgtcccactggtacttccaatggtaggctcgctaaaagcactaaaagagtggggagggtgcagagaagttcccccatgggtcattgatgggtcattgataggtcattgaagactccacccagccaatttttagccttttgtcccctgccccccatcagctaccttccaaccacaagctcactccctccttcccaatcatccacactggacttcagcacctccatgtccctagagttgccctaggtcttcagtcctaagtcaccttctccacccagttcccaggatcacagcttccaggactaccccatcagacacacatcatggcctgttgtcttgtcttatccaccatgtatccagatatctaaccacctagctatctcatccacttcctcaatctatcaatcactcatctacctatccaatgaactaatcacctatccacccacccctccaaccacctattaattcacccaaacacccactcaacccacccattcacttcccatctacccacccattcatccagcacccaagtaaatactcatttatccatacaaccaagcaagtacccaaccatccccacacacatctttccgcccagccccccaaacatccatccaccagtttgtctgttgatttggtccctccactaacatgtaagttccatgaggccaggagtcctgtctagttcattattgtttctccactgcccagttctcaggcgtctcaggagacctcaacatatgtacatatgatatatataatcacaacattgaaaaaaattttttcttactatgaaccaggccttttctaggcagacatacccaacctggttaaccaactacccagctactcacctaccaggtcaaacatccagcaaatgctaacctatccgtctgccgtttgctccacccactctacccctcacccatccactcacccatgatttgaatgactcatttacccaatcattcatacacagtatccaaccatctccacacctgacccccttcctttatccgcctcccagacccatggcctccgtgacatgaggagggcctaggaagatgctctcactgtgggattgggaggttgccaggggtggaatccatgcttcattgagaagcaggtgctgcctataacaatggtgaataccttttatcgaatgcctttaactatgggtcctctcactgtgtagggaactttacgtccatttcacagataagaaaacgggctcttaagagaatgaaggtctaaggtcacacagctggtgagaacttgtgtacatggccctctccatgagacttctaattaggggagaatttgggagagatgaatagggcttgcggggcaaatgcctaagaattggcaattcttagtgggcaaagaaaccaccaatttcactgaaatcaagattttactgggcaacttcatactgccagagtggttgggaccagcagctccactccccactgtaggccaagtagggctaaggcaaagtcagacaccccccctaagatggctatctctctgctcccagaccacgtgtgatgaggcaggatgggcagctcaggtggtgtctccattgaggcagggtgctttgaggggctggggttgactccaagacccccgcgtccttggagaaagctgcaggctctggacagcatccctcagctgagcctgagttctctccatctcatttaggcggtgctcctggggaggcagtggtgatggggttcagaaaccaggagagggctgcaccgcaacccttgctcctccaccgcccagacctgccccagggctcagatggcaatctcaccaggtttttcagactgtgcccttcattgcttgttaggttgtgctctgaatcaaactctgagctcctgtgggggtcgggggattggggcgaagggcagaggctaaggaagtcccttccagctcctggtgggagtgccagggactccgggggcggagcttggagtggaggcggagcttgtccagactgaggggcggggcctaaatatgcttgaagaagggtcggaccagagacgggaatggttggaatgacaggacctatcaatcatcccttggaggtggggtttggccagtcctgggtggggtcgtgactgagctggagggagtgcccaggctgagatatctcagtgcccggcccagccaggttgggaggggctgatggaggggtggggcctggatgagagaatctgccagggtcctaggccgaccttcgttgggtgggtccacctgggggcggggcttgccaagaggcagggcctggacagacttattggggcggggccagggtggggcttggccgtgctaggcgtggtttgggggggggggggagggcctggtcagatctaattggatcgggcccacctgggggcggagctaatggagagggctgggctcacccagcacggagcctggagtccagatcctgcagctggccccgcagctgctcctgctgctccgtcaaggcccggatttgggtgctcagcgactccacgaggcgggacagcactttctgctcctcacgcagagcggccacctcgcactgcagctctgccaactgtggtgggagagcagctgtaatctgacccgttgtcccgcccctgtgtctccccggagaccctgacctcccaggcccaagcgctcagcgtcatcaccggcctgcctagttggggaacatccctcctgcggtacagctggggagactgaagctcagagagggtcgggctaggcctggggtcacacagcacagcgagctgggtacttgaacccagacttgcctggcccttcagtcttccccagtcgcgtccctgttcccactccccaggcgcggacctgggcctgaccttaccttgttcacaggtcggtgcgtgcccagtgcctggtttcggtcttgcggctggtccatttggcgctgccagggtaccgacggcttccgaggcagcgaggcggagtcccgggtccaaggccgggcgcggggcgctggtcccatgctcagggagcctttgggtcgcggccagggccccgcagattggcggcggcgggcaggacgccggaccgggacactctgcgtgcgctgcaccggccggggccgccgcaggggccgctcttcgtccggccgtggccgggcccaactctctgagcggcgaacgctgcgcagagactggctcttggagatgagaggggtgtgcttggggaggtcccggggggccaggaagccgggcttctcccctgcggagaggctaggggtgggatggaggatcttagaccctccactggcccctgagacgaccccatcccgacctgaccagaagtgacctcaccccccacgtgaacttgtcctttcttttttttttttgagacaaggtcttgctctgtcgcccaggctggagtgcagtggctagatcatagctcactgcagccttgaattctggagctcaagctattccccagcctcagcctcccaaatatctaggactaccagcacatgccactatacccaggtaattttttttttttttggtagagatggggtctccctatgttgcccaggcttgtcttaagttcctggcctcaagtgatcctcctgcctcagcctcccaaagtgctgggattacaggcatgagccactgagcctggctcctgtccttgacttctgactataatactgtcctctctatgacccttgacatctctccaccctaacctctcctctcatccccgacctcaaacacactgtgacctttgacccaaccctttctataacctgtgattcccgtctgaccctgggcttgacctctgctcacaatgatccaacttcacctctgacccctgtctgagccctgctccttcctgttcccacccatcagaccccagaccagacttgaggttacctggagtggacctgggccgggggcagtgggagacgcattggcactgacacaagcacaggctggccctcctcaatggctcgcaggatggtgggcagtggttccagggtgtctcgggttgtctggtgaggcatgcaggacagagactgagcaaagtctccagggtcagagtctcccaagccttcttgcctccctactctgggttcaggccatacctggtcaagctcagcaaaaattgtacagagctgggcatgcaggacagctaactggagggccagatcaccactgccctggtaaccactgggggcagcatccacatccaccatggctacctggtccaggaagcattgcatggctggtccatgttcctccaggaagctattcatgaagcccatgtaggcctccttctcaccgaacctggatcagggccaggctgggtgggtcaggtcaggcacctgccacccccacactcccagcatggtccccccacccctagcttcccagcacctacggggcacggttggcgaggttctggatgaccttggcaatcagtgtgagggtgcgggctgggccgggtgctggatggtctggtgccaaaccaaagaggctgggtgccaggatggcagggcacaggagccgcaggaagagggaggcgcacaccagtcgggggcccagcacctcagagccacgttctttacatgcttctcgccagcttgagaacacgatgcccagctccgcagggaaccagctggtgcagaagaggcaatgaatggtcagacggggaggctatgggcataaaggttaaagtcataaggttgggagtcccagaagcactgcatgattggtccatgatcctccagagagctattcatgaagcccatgcaggcttccttctcactgaacctggggtctgggctctaggattgggaatatctgagataacaatgcttggggttatgaatcagcatggggccatggcttatggtgtagctatggcaatcgctggggataatactcttatagttggggatacagggtcacatgaagacagaggttatgagcttggatgtacttataattagacatgagactggtgggccagagtacaagatataaagtaggattggggctctggaggtcacctagggtcagaagtcacttgattgaagtcagggattaggtatgcaggttaacctagggtcagaggtcaagggattggaatcccaggtctcctgtgatcagttgcatgggatttgaggtggagggtcacttaaagccagggatcatggacttggggcatcatctggtcataggattgaggtcctatgttaactggagccagtggcatgaaattggggatatggaatcaactgtggttacaggacaaggaattgggtctcaggttacttggggtcagtggtgatagggttgcatggtgatagggttgccagatgcagcaaacgaaacttcaggacatccagttaaacatgaatttcagataacggagtgatttttatttatatttttacttttatttgggacagggtctctgtcaaccaggctggggtgctgtggcatgatcatagctcactgcagccttgaatcctgcgctcaagcgatcctccagcctcggctgggaatacaggtgtgtgccaccatgcctagctcatttttaaaaagctttttggagagatggagtcttgctatgttgcccagactggccttgaactcctgggctcaagcaatcctcttgtctcggcctcctaaagcattgggattacgggcgtgagtcaccatgcctggttcaaatgagtaattttttagtataagcatggtcccaattattgcatcaaatttaactgagtgtctcctgtattttatctggccaccctaaactggaggtcggggctagcatggtaagcaggggtgggctaagctgctggggccctgattctcactcgtaggaatggataatggtttcgaagacctcctcgcagctgttccgaagtctggcctggtgctctggcagctccgaggctggacatttgctggggtccacttcacagtcctcagtagaagcacagagacgccgcacaacctgtcctgcagcccagcacagccagataggggctggggccatgaccaccaaaacctgccacacccatcctccaaccttgtcttcaggttattccggaggcacccaacatcttggggagctcccaattgtccccaggatcctagcacccccaaaacaccactcactaccagaatccaggttgctcaaggactcttagaacttcacccaggtcccctagctcaccagcaggccgctgacatggactctcccccagctcacccagggtctcctggaggtaatcctgtgccacgagcttcatgtactcatcgatagccttggtggccaatgtgttttcccggaacagcagcgcctcacggcctccacagcgcgccagctccgcagtgcccaggtcagtcaccagcgcctaggaagggcaggaggtcaggttgcaccagatgcagacagagtccaagggaattcggatccttggctggtccctcacaccagaggcacaggccccgccccttgtagctgatgcttaggcccagtccttactgctggggctcataaccgaggccggaacctctaaccctcacagcagaaatttaagcctttcagcgctgaggtgcaacctgggccccgcccctcacgcgtgatgctcaggcccctgtcgcagctgaagcttaggctccgctcttcaaggtgtcccgccccttatgggtgataattaggccccgcccctcacagctgaagctcaggcccagtccttcaaggtgccccgccccttacaggtgcagctcagccccagcccctcacagctgacgctcaggtcccgcccttcaaggtgccccgccccttacgggtgatgttcaggccccgcccttctaggtgccccgcccttctaggtgccccgccgcttacaggtgacacttggaccacgcccctcacaccccttcaaggtgtctcccccattacaggtgcaactcaggtcctgcgccccaactcctgcccgaagcgcgttatcggtctacccctggtagccccggtccgcgctgtcgcggtgccgcacctgcgcccggccggtggcccgcagcacgcgcaccatggctgccgccagctcctccttggcctgcgcaggcagcgcgggctccagggccccgcagaggcgcgcatagtggaaggtgaggaactccgccagctccttgtagcgctcggacggcagcacgcgcaggcgacgcgcccgaatccgcgcccgcagcgctgcgcccgccggcgccccgagcagcgggaaccagcgctccagaccggcggcaggcgcgcgtggggcgtccagctcctccagcgccagggccacgcggcccagcaccgcgcttcccgggcccaagccgcgcagccgcagcgacaggcgacgtgccggtggcagcgcctcgaagtggaagcgctcggcccagaagagctggcctgggccggcccgaggcgccgtgcgtgccagcagcgcgccatccagccacagctcggcgcgcacgccgggtgcccccgccgctgctcggggaagccccttcgcttcgtgcacccacacgctcagccatgtctcttcccgctccacgttgtcctgcagatgggagtgggatggggggaagcgttttggtttgttggcaccccaaagaaggcaccgcaagtgaagcgtggagcctcaaacctgttgcgtcgggtccctagggagattgctgggcctttggggaaagaagtggagccacgggagtccggaggcggttacgcggaagtcttctagcttttctgggctctccgggagagttgggggctccagggcatacaagagtagtactggagtaaagacttcgcgattgcctggcaggcagggctttgggtgcatatggggccgggagtggacagaaggggcgggtctgatattcccggggctggtaatagatggaaggggagtcttggagccgttgcaacgatgcaggcggggcaggtgtgttgggggcgcgggttatggagcgagctggctttgggtagagtggaaggggcgggccaggcctgtgggcggggtctccgtgtcccgcttttctgagggcaatgacctgggtgggctggaattggcgacgaaggtcctcgatccagcggtctctctcagcggccgagcgacaagagaagcagcggcttccacccgtccaggttacctgttgggatggagaatccaacggtgtgatcgaggccaagggtgaagccaaagggtgggaggtgggactgaggtggaatcgaggtggactgtctacacttacctgaaagcagtggggctcccccaggaggctggggtgcagtggccagatccgcacatcccgctcggcacccaggtccagttcagagagtgtggccagcgactccctagagcccagagcactggggggtctgggaagggggtgggtgagcacaccgtcattcctgcctcttccccatcccccatagcctgaagggtagaggaaggccaggaaggacttcaacccaattcggatcccgtttctcccccgtgccccccccaccccccgccatggcacctccttgcttttaggataaactcaactcctggtgacctacatgaccaagctgggtccagatgttgtcacctcatctccctccacctaatccatcactttctgagctccagcctccctggccttgttttattttatcctatttatttatttatttatttatttgagacagagtcttgtttagtgcggtggctggatctcagctcactgcaacctctgccttccaggttcaagtgattttccttcctcagcctcccaagtagctgggatcacaggtgcccaccaccatgcctggctaattttctaatttttatatttttagtagaggtggggtttcaccatgttggccaggctggtcttgaactcctgatcccaagtgatccacccgcctcagcctcaccaaagtgtgggattacaggtgtgagccaccgtgcccagccctatttatttatttatttatttattgagatggagtcttgcccttttgcccaggcaggagtgcagtggcacaatcttggctcactgcaatgtccacctcccaggtttaagcgattcttctgcctcagcctcctgagtaactgggattacaggcattcgccaccatgcctggctaattttgtattttaagtagagatgggatttcaccacgttggccaggctggtcttgaactcctgacctcaaatgttccacctgcctctgcctcccaaactgtgggattacaggtgtgagccaccgcacccagccctatttatttttgagacacaatcttgctctgttgcccaggctggagtgcagtggcatgatctctgtgcactgcagcctcaacttcccaggctcaagcaatcctcccactcagcctccccagtaggtgggactacaggtgcccgccaccatgcctagctaatttttgtattttttgtagaaatggggtctcactatgttgcccaggctggtctcgaactcctagactcaagcagtctgcccactttggcctcccaaagtgctgggagccacttcacccagccctcttggccttgttttagttgcttctttcggcctcttggcctttgcacttgttgttccttctgcctggaatgctttttccacccccctgttggcctagttaacttccatccacccttcagatctcagctcaagggtaccttccctaaccctcccagaccagttgattgacttagctcccattttagagttattgtgtcagactttgcccccaccctggctctgtgctagatcattcaatgtccccagcatcaactgatgtggggcagaacacagaggccacagggggtgtttggtgtagattggaatgatatgcaggaggtggaggaggaggggccagtgttgaaccccagcccctccagcctctcatacacccttacccatcccggggctccaacctggcctttttcttctctttcagcctcttgagcaacccctgtggggaagggaatgtcagctggacagaaatctgtgctccttcctcagctccttccctcccaagacatcccagaggatctactggtcttggaggaccaacaccaagctcaggctgtattagcaggaataataagagcaatcagcagctcctaattctttgttcatttgtttttttaagacagggtctcgtgctgtcgcccaggctggagtacagtggtgcgatcatggctcactgcagcctcaaatttctgggctcaagtgatcctcttgcctcagctgggactacaggtgaatgttaccatgtagaattggggacttgctatgttgcccaggctggtcttgaactcctggtctcaagcaatccttctgcttcagcctcccaaaatgttgggattacaggtgtgaaccactgtgcctggcccaaactcccatttgtaaagcatcaatcatatattctcctatactattcatttatttatttaagagatgaagtctccccatgttgcttaggctggtgttgaactcctggcctcaagcagtgctctctgctcagcctcccgagtagcttggactatagctgcgcactgccctgcctggctcctgcactctctattggcttcccataaacaacccctagagaaaggttatttcattagcttcatttgacagactgggactctgaggcccaaagagggtcagcaacctgctccagatcacccagcaagagtgccctttcagctttgagggtccgagagtcttggctctcccctctacctcccaccttcactggctgccttacccgaacgttgtggacctggttgggaccagcagtctccggttctgtttttccaggcatccgatctgtgggtcgttatgggtggcaggttggggggttggattctgccccacttttagagcctcccaaatgccccaggcctttccacccctcaagcttacctggatccctgaagttccccatggccacgtggatgctgccctcggagctagcacttcccacccggggccttcgaggaccctgttctcccgcaggagtgggtagtcagagaggggaggcaggcaggcaggcaggcaggcagaccgagggagaggcagacaccttcccattatcctccctccagcccctgcctctgttctgccctcctcctttttctttcttccctcctcccctttcccaggtgccccctctcacctcctcctctcctccaagcagcaccagcttcccatcaagcagggtgaagcccccaatgtcccagacaggcacgttgggtgtgggggcctcagggatctgtggggtagggggctccagctctggctccggctccagctctgggaagaagaggaggcactgggggacttaagagacgttttctctccctcaggctaccctttccattcccgaaggctcatggtgggttccctcctaggtgccccccaccccagcagccgtatcagactgtatgaccttgggcaagctttcatcgctgtctgggccttgtccccactaaccatgggtagcagacacaactcacctaccatgtgcccagtaccctgtataccactccacacaccttcttgcattgaatcctccaaaagccattcaaagggctatgataacaggctcagagaggttgagtgacttgctcagggtcacacagtttgtgagtggttgggctgggcttcagtcacaagcattcttctctctctctctttttttgtttttttgttttttttgcattcttctcttaaccaagacattatgtgggtccaagaggttaaaaaacaggacaggggctgggcaaggtggctcatgcctgtaatcccaacatttgggaggccgaggtggggcagattgcttgagaccaggagtttgagaccagcctgggcaacataacaagaccctgtctttaaaaaatagcctgatgtgcctgggctctgtggctcacacctgtaatcctagcactttgggaggcctaggcgggtggatcatctgaggctgggagttcaaaaccagcctgaccaacatggagaaaccccgtctctactaaaaatacaaaattagccaggcgtggtggcacatgcctgtaatcccagttactcaggaggctgaggcaggagaatctcttgaacttgggaggcagaggttgcagtgagctgagattccgccactgcactccagcctgggcaaggaagtgagactgtgtctcaaaacaaaaacaaaaacaaaaacaaaatgggaatataagcagtgagaattaaatgagcttccaggaaataggagggctgaattagccctcccagattgcctgtctgttcccttgtttttaccaccaggagcaataaatgataactcccgcttattaacggatcacttaaaatatgttgggcctggggccgggcgcggtggctcacgcctgtaatcccagcactttgggaggctgaggcgggcggatcatgaggtcaggagatcgagaccattctggttaacacagtgaaaccctgtctctactagaaatacaacaattagctgggcatggtggcgggttcctgtagtcccagctgctcaggaggctgaggcaggagaatggcgtgaacccaggaggcggagcttgcggtgagccgagatcgcgccactgcactccagcctgggcaacagagcgagactccatctcaaaaaaaaaataaaaaaaatgctgggccctaggctagtgttacattcctgagccctaattcttgtgatatccattactcttctagatccccctgtgtgacacttagcaccatctgtcattttttttctttcttttttttttttttcttccattgagatggagtctccctctgtcgcccaggcgggagtgcagtagtgcaatctcagctcactgcaacctccacctcccgggttcaagcgattatcctgcctcagcctcctgagtagctgggagtacaggtatgtgccaccatgcctagatacttttttttttttgtatttttagtagaaacagggttttgccatgttggccaggctggtctcgaactcctgagctcaggtgatccacccaccttggcctcccaaagtgctgggattacaggtgtgagccatcatgcctggcccatctgtcattttcttgttgatggatttcctgtcaattccactacactgtgagctccatggggcagggagggtcatctgtctctttcactagtgtgtcctcagtgcctaaatcagggcctggcacatacaatagaagctcaacaaacctctgcttgaataaatgaatgaatatgagcaaataaaattatatactctccaaaatggagatcattattctcactgaactgatggagaggctgaggcttaagggctcagaacaaagacacggaagctagaaggtaggagagtaggaggcaggctgaagatggatatccaggtaggaaaggatgggcctgagccattgaaggagagacccgttggggccaagagccgtttagcctctggacaatactatcacgggtttacattcactgttccttcctcagatggaccctctgcccacaggaccccggcaactcctcctaccctctttagggggaaagagggaacagggtagctgggccccagcggcttcctgctgggcttttgcactccccacaacttcctgtgtctgtatggttgatgctccggaggcagacaaaacccaagcatccggcttcccagcccggcccaagctcagggtgggggaaccatgtacctggggcctcctgctccggctccgggtctggctccggcggtgggttcttatgcctcccccagagggccttggagagtcgaaggcgactggtccgtgactccttgggaggcgcagataggacccgacggaatatcgagcgaggggctggctgggtgctgaccatgggctcctggtggctcagggccctgccccagccagcaaagcggccccagcggaaccctccagccgccttctccccaccgccccctgtgtgccagcggtaggaagtcagcggagaggtggctgtgggctgggtttgggaggtccggcttggcgacggtgggtccatggttgggggggggggtctcctgggggacgagagagtgacagtagtgcccagtgtctgtccacatactgccctcatctcggccccctccccaccctcagctctgcctccaggaatccccctgcccccacctccactccctcccttaccttggtttcctgaccagccccagaatcagcagccgtctgcaccccgcctggcttcctccctcggaacccaactccacgtgaccctctctgtcccaccccaccccacagccaggctgggagggcacagtgcgggcaggttgctggaggttcgagggaggagaagagaggaggtgggttaccaggcttctagcaagaaggacccagactgcctccctgacggggaggcagcacttgcccctctctctgagcctccgttgccttctctgcaaaatgagtacaggctgaacaaatgctggcgagaatacaaagcacctagaactctaatccacagttggccggagtgtagacccattcactcatgttgggaaacggtttggcaggatctactaacactactagctggatcttctctgactcagcaattccattgctaggtagacgtccaatagatatgcccccccagcacaatgcataatagccccacattggaagcagcctaagtacccattagtgggagaaggaataaattgtgatctcttcgcacagcagaatatcatacagcagtgagaacaaactaaagaatgatttaacttgggtgaatcacaaacaatgttgagccaaaaccaaaaccaaagccataaaatgccagtaatctgagctattcaggaggctgagggaggaggatcgcttgaggccaggagttcgaggctgcagtgagctgtgatcatgcctgtgaataggcagtgcactccagtctgggtgacatagggagacctcatatctaacttttttttttctttttcccctccctgccctcgggagaccccatctctaaaaagcaataataaataaatttaaaaaccccaaaacaatgaagagtatacactttgtgattccatttacataaagtcctaaagcaggcaaaaccatgtctaacaagcagggtatcagtttcttttggaggcactggtggctgggaagagggtacaaggggggcttctggaagatggcaagatttattattactcttattattattaattgatttatttatcgagaaggagtttcgctctgtctcccaggctggtgtgcagtggcacgatcttggctcactgcaatctctgcctcccggattcaagtgattctccctactcagcctcctgagtagctgggactacaggtattcaccaccatgcctgcctaatttttttgtatttttagtagagacggggtttcaccatgttggtcaggctggtcttgaactcctgacctgaaatgatctgcccgccttggcctcccaaagtgctggtattataggcgtaagccaccgtgcccggcccttattattattattatttataaatgaggtctataaaaataatatagatctcataaaataaaaatataatatttatattacatagtaatataaataatattacattatacataatatgaatattattattttttgtagatgaggtctgtcatccaggctggagtgcagtggtgccatcatagctctctgtaacctctaactcctgggctcaagagatcctctcgccttagcctcctgagtagctgggactacagctgcatgccaccacacctggcttattaaaaacaatttttttgttgttgttgagatgagggtcttgctttgttgcccaggctgttcttgaactcctggcctcaagtgatcctcccacctcagccccctaagtagctgggataataggcacatgctaccatgcctggcctattttttttttaattgaggtaaaattcatataacacaaatttagcatgttcttttttttttaataagatttttttttgagacagggtcttgctctgttggccaagctggagtgcagtggcacaatcacagctcactgcattctcaacctcctgggctcaagcgatcctcctacctcaggctctcgagtagctgggactacaggtgcatgctacctgactaatttttaactttttgtttgtttgttttttgtagagatggggcctcactatgttgcccatgcttgtcttgaactcctgggctcaagcaatcctcatgcctcagcctcccaaagtgctgggaatacaggaatagcatcagcctctgtgcccagagagacgaagccttgttctgtcacccaggcaggagtacagtggctattcccaggcatgattgtgggtcactgcaaccttgaattcctgggctcaggcaatcctcctgcctcagcctcctgagtagctgggactgcaggtgcatgccaccatgcctggctaattttaatttttttttttttgtaaagagacagggtctcactatgttgcccaggctggtctcctactcctgggctcaggcagtcctcctgcttcagcctctgtagtggctgggactgcagatgtgtgccaccacgcttggcttaacatgttctatttcttgagctgggtcctggttacatggctgtgtgctgttgtgaaaattcatcaagctgtgcccttgggagcactttcttgtatctctgttaggcttccacagatgtttacttgaaagccagaggtaagtaaatgccattctgaggaataaatgagtcagcataaatccggtccaggagccgagtaccagctggcccctctccctctgtgtgacctcagacaagtcatttcctctctctgagcctcgttttccttatttgtacaagacgataatatcagtttcaaaagattcatgtaagcctttgtctagtcaacaaatgtttcccgagtgcctattacatgctaggtgctggagaggccgcagagaactaaccaaacttggtttctgccttcctggagctcacagatgatggaggtagataagatcctaaactcatacatgagacatttctagctggtaaggaggacctagaaggaaataggctgcagtgaatgctgagcaaaaatgccactctttgagctggaaaaatcagggaggacttccctgaggaggtgacatttgcagccatttgtatctagcagatggagtccactatgtctgtgtaacaagcattccaaaagtgccagtgaattaacatgtccctgagagcagccctcacataataactggtgggaattagtgtataaataccccagctccctcaacccttgtgtgggatgactcaggtatgtgtcctatgctctccctcagggcttcgaagtgagactgagctctcttgcctacagtggaaacttgcttgaaaacacattattccctggctgcctccagttccctgcatcggtacctgggttgttcacctctctattttttctttttctttttttttttttccttccttccttccttccttccttccttccttccttccttccttccttccttcctcccttcctccctttctcccttctttcctctttctttcgttctttctttcttcctttctttctttttttttctttgagacaagctctcactctcttctccaggctgctgtacagtgacgcaatcatggttcactgcagcctcgacctcccagcccaagcaatcctcccacctcagcctccggagtagctgggactgcaggcacacaacattgtacctggataattttttctttttttgagacagggtcttgctctgtctcccaggctggagtgcagtggtgtgatttcagctcacggcaacctctgcctcctaggcccaagtgatcctcctacctcaagtgtgtggcaccactcctggctaattttttgtatttttgttagagacggggttttgtcatgttggccaggctggtcttgaactcctgagctcaggcgatccaccctcctcagcatcccaaaatgctgggattacaggcatgagccaccgtgcctggctatgcctggataatttgaaaatttttttttgcagagatgagatttcactctattgcccaggttgttttcgaactcctgagctcaggtgatcccctcgcctcagcctcccaaagtgctgggattacagatgtgagctgccgtgccctgccctgggatctcctctcaataaactacttgtactggaattattgtcttaaggtctgcttttgggaagacccaaactaagacaatgcatgatgatgcatgaacagagactttgtttccatgctgtctttattggaggtctgtggctggcagggtccttgggggtggctccctcctggatctcttagagacactcctggcaggtcttggcttaacagtctggaaaaagacaagggagtgtgaggcttgggggtggttgtggtatgtggctgggtctgccctcctggtggtggaaccctggatcagggaggggacagtggcccaaagtgagagagtgaggacaaagccaactataggccgagatggatgtgctagtcaatagcttaatgaaatggagtggcagtatgtaggtagcacgagattgtccaggtgtgattctaaaattgttttagtgatggcgatcaagggctgggatgaggtcatcaggtcaaagttgtgctggcataagagttgtcatcaggggttaaggagtcagggacgaaacaagcaacctcagagttgagattgtctggacagagaattgcaacacaggattaaggactggacagaggttgtgaaggcaaaaggtcacagcctaggttcatgttgtgtggacagagggccttcgggtaggggcaggggtgaggtcaaggttcggcgggccaggatgaggtggtgcagcctgacaggttgtgacttgggtagagaagtcatgaaggccaggctgaggttgtgagggcagaggggctgttggcaggtgtcagggtccatgccttggctggaaaggtagaggtattaggagctggggaaaggacaggctggctgggtctggggctgagctgaggctgcataggcagaagtcacaggatcagggatgttgcccgcagagtgacccgcaaaggctgggcctaggtttcctgaatagacgtgccgccgggaagttgggggcctggctgaggctgtgcgggcacagctgttacaggcagggggcaggggcctcgtggagcttgtgtagacggaggggcggcgggccgtgtagtgcaggctgcgaagactcaccgcggtgaagtgcggccaggtgcgcagcaggtcgaagagcgcgtcgccggggcagtcggtgcgcaccagctggcggtggcccagcagcgcgtagtctggccgcaggaggccggcgcgcaccgcacaactcgggagcgtgtcgcgcaccgtgcgcagagcggcctcggtgggcagcgccgcggtgtagttgcccactatggccacgccgaagccccgggagttgtggccgagcgtgtgggcgcccacccagtgccagccgcgtccctcgtacacgtagccgtccgagcccaccacgaaactgcagaggggagggagaagcaagcaccatgcggcgtgagggggacccgggcccttatccgctcccctccccgattctgttggtgtgccaagggccaccgaccccaagacccgcgcggtcgcgctgcctgtgtcccatccagctctgttccactctcacaccagctgccactccaggaccgttcggtttctctggatccgcccttcagtactggcacgcccctttctgcccttctcctccccacctctgccttttctcaagcccagttcttgcccaattcagagagcttttctgtttttgggttttttttctttccttccttccttccttccttccttccttccttccttccttccttccttccttctttctttctttctttttttgatggagtttcactcttgtcgctgaggctgaagtgcaagggcgcgatctcggctcactgccacctccacctcccgggttcaagcgattctcctgcctcagcctccggagtagctgggattacaggcacccgccaccacgcccatctaattttttttttaatttttatttttagtagagacggtgtttcgccatgttggccaggctggtctcgaactcctgacctcaggttatctgccctcctcggcctcccaaagtgctgggattacaggcgtgagccactgtgcccagccttctcccctcccctcgccacccctcccttcttcccttcccttcccttcccttttggagacggagtttcgctcttgtagcccaggctggagtgcaacgacgcgatctcggctcactgcaacctccgcttcccaggttcaagtgattctcccgtctcagcctcccgactagctgggattacaggcatgcaccaccacgcccggctaattttgtatttttagtagagacggggtttctccatgttggccaggctggtctggaactcccgacctcaggtgatccacccgcctcagcctcccaaagtgctgggattacaggcgttagccaccgctcccggcctccttcttcttttcgagacgggttctcgctctgtcactcaggctagagtgcagagatgcgatcataactcactcaagcctcgaactcctgggctccagcgatcctcccaccttagcctgccgagtagctgggactacaggcgcgcaacaccatgcccagctttttttttttttttttttttttttttgagacggagtctcgctctgtcgcccaggctggagtgcaatggcgcgatctcggctcactgcaggctccgccttccgggttcacgccattctcctgcctcagcctcccaagtagctgggactacaggcacccgccatcacgcctggctaatttttttgtattttttagtagagacggggtttcaccgtgttagccaggatggtctcaatcttctgacctcgtgatcctcccgcctcggcctcccaaagtgctgggattacaggcgtgagccactgcgcctggcctttttaagttttttttgtttgtagagatgggtggtgtgggggggtgtcttcctatattgctcaggctggtctcgaactcctgggctccagcgatcctctcttctcagcctcccaaagtggtgagattacaggcgggagccaccgcaccaggcctccttgtctgttttaggccatctctgcctggccccagacccagactctgccacaggtcccgctcctctcccagatcccgcctcctgtactagttctctaccctgactggagtcccatgatttagctattcccggtccctattaaggccccgcccctagcctaagccacgccacctctccaactttgctctacctatcaggactcctccttggtcttgccagctttcctcgggttcaagcccggtcccctgcatcaggctccgcccactcagaccccatccccgaacgtgggccccgccccctccccggtcgggcccctcctacctgtagccgatgtctccccagccttgcgtgtcctggtggtagcgctgcatggagcgcatgttggctgcgcagcgcgtgaagtccgtgcagggtggtgcaggcacgtaggtgtgatgcacgtacaagaatcccagcggcagctgcagcagcttcgggcggccccgataaggcgccgctccccagcggcagcgggggtggatggccgggcatcctacaggcaagggggttgaaggctggggtcaggaactgtttctctgcctgttcctccacccgcattaaagcgcacatacagaccatccctcagcctcctctcagatttggaaagggtccagtctcaccccacattggtcctccctggggaccaactaactatactcaactaaatctattttatttttattaaaaaaaattgggggtgggccggacgtagtgggtctcacctgtagtcccagcagtttgggaggacgaggtgggtggatcacttgaggtcaggagtttgagaccagcctggccaacatggtgaaacccggtctctactaaaaatacaaaaatcaaccaggcatggtggcacatgcctgtaatcccagctacttgggaagctgaggcatgagacaacttgcttgagcctgggaggtggaggttgcagtgagccgagattgtgctattgcacaccagcctgggtgacagagcaagactctgtcccccccaaaaaaaaattggaggtgggggcaggcatggtggctcactcctgtaatcaatcccacactttgggaggcgaggtgggtggattgcttgagcccaggagttcaagaccagcctgggcaacatagtgagacctcattttctagaaaaagagaaatcagatttcccaaagcaatctacagattcaatgcaatctctatcaaaatatcaaagtcatttttcacagaattagacaaaactatcctgaaattcgcaaggaaccaaaaatgagcccaaatagcaaaagcaattctaagcaaaacgagcctggtatcacattacctgacttcaaattatactacaatactatagtaaccaaaacagcatggtactgttacaaaaatagacacatagaccaatggaatgaaatagagaacccagaagtaaagctgcacacctacaaacaataattttcaactaagtcgacaaaaataagcaatgggaaaaggactgcctattcagtaaatggtgctaatggtgctgggacaactggccaaccatatgcagaagaatgaaactggacccctaactcttaccatatacaaaaattaactcaaggacagatgcgctagctcacgcctgtaatcccagcaattttggaggctgaggtgggtggatcacctgagatcaagagtttgagaccagcctggccaacatggtgaaaccccgtctctactaaaaatacaaaaattagccgggcatggtggtaggtacctgtaatcccagctatgtgggaggctgaggcaggagaatcgcttgaacccaggaggcagaggttgcagtgagctgagatcacatctttgcactccagcctgggcaacagagcaaaaactctgtctcaaaaaaaaaaaaaaaaaaaaaaaaaaaaaaaaaaaaaaattgctcaagatagattaaagacttacatgtaagacctgaaactctaaaataccagaagaaaacctaaggaaaacgcttctgaacattgggctaggcaaagaattcatgactaagacctcaaaagcacagagcaaaagaaacaaagtagacaaatgggacttaattaaaccaaaaagcttctgcacaccaaagatataatcaacagaacgaacagacaaccttcagaatgggagaaaatatttgcaaactatgcactggtatgggactaatacccagaatttacaaggaactcaaacaattcaagaaagaaaagaaagaaagaaagaaagaaaaagaaagaaagaaagaaaaagaaagaaagaaagaaacccactaaaaagcgggcaaaagacattaatagacatttttcaaaagaagatatacacatggccaataggcaaaggaaaacatgctcaacatcaccaatcatcagagaaatgcaaattaaaaccacaatgagatatcatcttactctaatcagaatagctattattaaaaagacagaaaagccgggtgatggctcacgactgtaaccccagcactttgggaggctgaggtgggtggatcacctgaggttaggagtttgagaccagcctgggccaacatggtgaaactctgtctctactaaaaatacaaaaattagccgagcatggtggcaggcacctgtaatcccagctacttaggaggctgaggcaggagaaacgcttgaacccaggaagtggaggttgcagtgagccgagattgtgccattgcactccagcctgggagacaagagtgaaactctgtctaaaaacaaaacaaaacaaaacaaaacaaaaaaaataataataaattggaactatcattcaatccagcaatcccactactggatatctacccaaaggaaaataaatcattatattaaaaagatacctgcattcacatgttgatcagggcactattcacaatagcaaaggtaagaaattaacttaactgtccatcaaaagagaattggataaagaaaatatgatatatattacaggcctggatggctctgggtctgagagccctggacgaaggtcaggcccaggtttccagctagggtgattgccaggaggttgtctacagtggtcggcaggaaatggaatactactcagctgtaaaaaatgacataatgttggctgggcatggtggctcacgcccgtaatcctagcactttgggaggccaaggtgggtggatcacgaggtcaggagatcgagaccaccctgataaaatgatgaaactccgtctctactaaaaatacaaaaaattacccagacatggtggcacatgcctgtagtcccagctactcaggaggctgagacaggagaattgcttgaacccaggaggcggaggttgcagtgagctgagatcgtgccactgcactccagcctgggcgacagagagagactcaaaaaaaaaaaaaaagaaagaatgtcttttgcagcaacatggatggaactggaggccattatctcaagtgaaacaagtcaaacacagaaagacaaataccgtaagttctcacttataaatgggagctaaataatgtgtatgcatggatgtagcgtgtggaaagatagatagtggagattcagaagggtgagggagagagaggagggaggatgatgacagattgcttaatgggtggatgtatgttattggagtgatgggtacctaaaagcccagacttgaccactatgcaatctatgcgagaaacaaggttacacttgtaccccataaattaatgcaaataaatataatgaagcaaaacaaaatgagatgaactcctattcatccttcaaggcccaactctggcatttcctcacctgtgcagctgtcccacccacccccgaccagatcccttattgccccctctggactctcctagtcctcaacttccctgaatatacggggtgggggcgtctgtgtctgtaatgggaaggatcacagggtgtggggaacttcctcacccaggaaggcctcagtgaattccttggtagcattggcagccacctgggccagctgttcttggctcatgcactgaagctggaggtgtactggctccagcctctgtagaaggacaagggttccccacacctgctgggccaggatggaggctgaagtcagagcagcaccgttctgccgtcggaagttgctgcggaaccctgggtctctggccaccccagccccatagtactggctcagcaagtggctgagggatggccggggctcaggagtccggctcaggtagtctccaaggatgaccccatccagggcgccattgaggaaggccatggttaacagagatgccttggggtccaaaagcgtaaaggtccgaggggcagagagctggtcccagcagccctcagttcccaggtctggatggctctgggtctgggaacctcggaggaaggtcaggcccaggtttccagccagggtgactgccaggaggctgtccaccatggtcggtggggacttggctttggcatctggcaaggaagcttggacatctggacagccttttgtagcatctggagtgttggctccaatatctgcagtggtgacatctggagagccatccctgagtcctggggaggaggtggctcttacatctggagcaatggccacaacatctggaaaggtatctccagtctcccaaggggcagccatgctgtccaagggcaaatttatgaccctgcgcccttgcagccctgcctccagccccgccagcagaggctccacagccacggtcgagccatcaggtgccagcaccaccccatattccttcccttctcgtacgtcatgtcgggccacctccttggtcaggcctaacagctctgggcttagtgggcagggatccaactctgtagcattgaggctccatgcccccagcaggaagtggtagaggcgattgtgggggccagagtttggagctgacatcagccacgcagaagctgtgtgtctggtcttggcagctggcactttctgctccagctcagccagggcctggatgacagagtccatgagcaggggcagggaggctgcaggaggaaagaatgtgttagcccagccccacccattcctgagcctccttgtattgattccacatctacccaatgctcccagccctccatctgataaccccatgacccccaacactatccttgtgtagatgaggaaagtgaggtacacagactattgcctgttggttaaggagctcagactgtctgtgagtactggggagccatggcagatttatgagcaggacagaggtgtgacgaacctggcattctaagactcctttcttaggcttagatttgtttggctgccataaggaaatggatttttggggtgccaggatagaaaaggggagacagtgtggaggtgagagatgaaggtggcagaaggtaggtagtgacattgcagtggacaaaagtggaagagtccccagatcgtgagagggagagatggatggtcttttgtgatgaattgaagttaaaaattggggatgttagagggaaaggtattttgaaagatgcctgggactggctgtggtggcttaggcctgtaatcccagcactttcggaggccgaggtgagtggatcacctgagatcaggagttcaaggccagcctggccaacaccgtgaaaccccatctctaataaaaatacaaaaattagccaggcatggtggtgtgtgcctgtaatcccagctacttgggaggctgagacgggagaatcacttgaacatgggaggtggaggttgcagtgagccgagattgcgccactgcactccagcctgggtgacagagtgagactttgtctcaaaaaaaaaaaaaaaaaaaaaaatgccagacgcagtggctcacgcctgtaatcccagcactttaggaggcagaggcgggtggatcacctgaggtcgggagctcaggaccagccggatcaacatggcgagactccgtcactactaaaaatacaaaaattagctgggcatggtggcacacacctgtaaccccagctactcaggaggctgaggcaggagaactgcttgaacccaggaggtggaggttgcagtgagccaagaaccccccactgcattccagcctgggtgacagagtgagactccatcataaaataaaataaataaaataaaattaaattaaaataaaataaaataaaataaaatagcctgggaggcagggggaagagcaggatgggcttgtgccatgttggggaaatgtcagtggctgaactgcaaacctagaaatgctaagttaggctcagagctggttcagagatgggttatcaaataatagctaactttcagtaaacatttactatgtgctagctactagtctaggtgacttatatattaataatttaacgcagttagtcttcacaactcttgtgaggtaggtccttttagcccctgtcttagtacattggtgctgctataacagatctctgaggttgggtaatttatgaaaaacagaaatttggccaggtgtgctggcacatgcctgtaatcccagcactttgggaggccgaggcaggcggatcacttgaggtcaggagtttgagaccagcctggccaacatggtgaaaccccgtttctactaaaaatacaaaagttagccgggtgcggtggcgggcacctgtaatcccagctacttggggggctgaggcaggaggatctgttgaacccgggaggtggaggttgcagtgagctgagatcatgctgctgcactccagcctgggcgacagagtcagactctgtctaaaaaacaaaaaaaaagaacagacatttatttctcatagttctagaggctgggaagtccaagatcaaagcactggcatttgggacttcctagcctgcagaactgcaagaaagtaaatttctcttctttacaaatttactcagtttcaggtaccctggcctatatagaagcacaaagggactaagatggtgtccctttacagatgaggcatctgaagcacagagaggttaagttacctgcctaaggtcacacaggaaggaagtggcagaggcaggatttgcctttgttttttttttttttttttgagacggagtcttgctctatcatccaggctggagtgcagtagtgctcagctcactgcaacctcctgagttcaagcaattttctggcctcagcctcctgggtagctgggattacaggtgcctgccaccacgcctggctaatttttggtatttttagtagagatggggtttcaccatgttggccaggctggtctcgatctcctgatctcaagtgatctgcccgccttgatctcccaaagtgctgggattacaggcctggccagtagtagaatttgaatccaggaagtcttactcgacacactctcctggtctagaatctaggttcttctccagtccaccacctaacctgtgtagctttgctcttctctgcaaaaaatgccctttctggcttctcccccaaatcatttctctttcttcctagcctagctcttatgtctcctcctccaagaagccttccctacttttgctctccaggccccagattccttcccttatccttgccttgactctgtggagctgggaatatctatgtccccatgctggagcttctttgagagcttgagtctccagcctcactccatgcagggcaagacatagatgggacagcagtacgccttctgcagagccaagaggtttggtcccaggactctgccccctgactcacctgtccctgggtctgaccacagtagcaatccgagtaggatccagaggacaccctgggccattgttgcaggattccagcttccaaggggtatttctggttggcctcggcagagaacctcggcagtgctggagggagacaggcacagagaactgagcagagcctttgaccactgtcaaagtccagcggcgaatgacagacctgcctctcgtagagctgtgggcgggaggcagcagggacatggggcagcgtaccctgggtcaaggtcatctgggcatcctggtctcccccagtctcttctgtccctcctaggctgaggtcagtggtcagtaagccaggcccatccccagaggggcctggagaccaggtggttcagactccataaactctgcccattctccagtgaggtggaccgaggcaacccctcaagtcctgtccctccccatagtgacggctctgtagccgctgctggccaccagaggggactctcagctgccgcctgctgtactggtaagaccggctgtgttgagggagaggagagaagcagaggcctgaagttggcactgccttctgcttttttttgcaaccaacacttcaggctcaggcacagcatcggtgcgggggctgaggacagtgtttgctgaggcctgaagttggcactgcctcctgcttttttttgcaaccaacacttcaggctcaggcagagcatgggtgcaggggccgaggacagtgtttgctgaggcctgctctgagcccatggggaccaggggctgtcacctctcatccagttccagcccttgatttcaagccaccagcagtagctgagagcaggggttgagcttgagtgttcaggaccctggcattgttccaggagctggcttctggactcacctgggctgacagtgaaatgtccttcctcttctccgggtgcccatgactgagacctgcagaatggacccatctcccctttattctggcatcagatggggcaggttgacatgactgggctgttgtgtatgtaaattgcttccctgtggggctcccacctcaaaaccagcccggggagtttccaggagacccaccagctggagactcagccagggcaggcctgggaatgtccagcctgagccaggcctgggattcccctgggggccacccctggggcctcctcaggtgtcctctttctggggacctcccagaaaaaagctgggcacatagtggaagctcaggatgtagggtgctaagtgatagagtgaatgggggacacttcccatgggagtaagagacaatgtcctcctccaagctcgtttcccaggatttggggataggagctttgcctggtagaaccatatgaaggttgtgggctgaggcagggactaggttgaggcatcctctttgccgcaaaatttaaggcagtgttgaaaatctaagtcatcaataactttttttttttttgagacggagtctcgctctgtcacccaggctggagtgcaatggcacgatctcagctcactacaacctccacctcccagattcaagcaattctcctgcctccctgcctcagcctaccaagtagctcaggttacaggcatgcgccaccatgcctggctaatttttgtatttttagtagagacggggttttgccacgtaggccaggctggtcttgaacccctgactcaggtgatccacccaacttggcctaccaaattgctgggattacaagcgtgagccaccatgcccggccgataaataattttaagacttttttagaacagttttattattattattatttttaaagatggagtcttgatatgctggccaggttggtcttaaactcttggcctcaagcaatcctcctgcctcggcctcccgaaatgctaggattacaggcgtgagccactgcacccagctttattttttattttattattattattttttgaggcagggtctccctctgtcacccaggctggagtgtagtggtgcaatcttggcttactgcagccctgcttcccaggttcaagtgattctcctgcctcagcctcccaaggagctgagattacaggtgcccgtccaccacttccagttaatttttgtatttttagtagagacgggatttcagcatgttggccaggctggtctcaaactcccaacctcgggtgatccacctgtcttggcctctcaaagtgctgggattacaggctttttttttttttttttttttttttgagacagagtctcgctctgttgcctaggctgcagtgtagtggcacaatcttggctcactgcagcctctgcctcccaggttcaagctattctcctgcctcagcctcccgagtagctgggattacaggtccccgtcaccactcccggctgatttttgtacttttagtacagatgtagtttcaccatgttggccaggctggtcttgaactcctgacctcaggtgatccacccgcatcggcctctatttttaattttttatagagatgagggtctcgctatgttggccaggctggtctcatctcctggactcaagggatcctcctgccttagcttcccaaagtgctgggattacaggcgtgagccaccatgcctggcctagagcagttttaggttcgtgacaaaattgagcagaagttacagagagttctactccctgccttgacacatgcacagactctcgtattatcactatccagcaccagaatggtatatctgttacaatcgatgaaccttcactgacacatcattatcacccaaagttcatcatttccattagggtttgctcttggtggtgtacattctatgggtttggacaaatgtataatgacatatgtccaccactagagtgtcatacggagtacagttgacccttgaacaacatgggtttgacctgtgagggtcaacttatatctggatttgtttcaataaaaattacatggactgtgcctgcctctcctctccccttcctcctcttccacctctgccacccctgagacagcaagacccctcctcttcctcctcctcagcctactcaacatgaagacggtgaggatgaagacctttatgatgattctctacttaatgaatagtaaatatacttcctcttccatattttcttccttctcttccttctcctttcttcccttctccttccttccttccttccctccctccccccttcctccctccctcctttctttcttttttctttctttctttcttcctttctttctttctttctttctttcttccttccttccttccttccttccttccttccttccttccttccttccttctttctttctttctttctttctttctttctttctttctttctttctttctttctttctctttcttctctttctttctctttttctctttctttctggcagagtctcattctgtcccccaggctggagtacagtggcgtaatctcagctcactgcagcttccatctcctgggttcaagcgattctcctgcctcagcctcctgagtagctgggattacaggtacctgccactatgcccggataatttttgtatttttagtagagatggggtttcaccatgttgggcaggctgatctcgaactcctgacctcaggtgatccatccacctcagcctcccaaagtgctgggattacaggcatgagccactgcacctggctcgtggattttttccaataagttacatggagtgtgtctgcctctcctctctccccttccacctcctccacctcttccacctctgccacccctcagacagcaagaccaaccccttcccttcctccccctcagcctattcaacatgaagacgatgaagatgaagacctttatgatgacacacttctacttaatgaatagtaaacatacttcctcttccatacgattttcttagtaactcttcttttttcccaggttcaggtgattccctcgcctcagcctccagagtagctgggactacaggcatgcaccaccaaggctagctaagttttctatttttagtggagatggagttttaccacattggctaaactggtcttgaactcatgaccccaggtaatccacctgccttggcctcccaaagtgttgggatgacaggcgtgagccactgcaccccacctgatttccctttaaagcttggagttggggcagagactgccttgttttaagccaggggcatgtcatggatggcaggctctttccttagggtctatgtaggatttgtgaccttctggggcaggacccttcctccagggagcctctgtggttaccccttgctccccttactcctcccagctccctgacctgctgttcttcccttcaacctaggctgtgcttacagtgctggaaggttctttgtccagttttgtctccccaaatctaggagatgctgagtttttggggctgtccagaagtgcccagcacagactcaagaccaagtgagtgtcagggagggattgctaaatgcacaaaaagcctgatgaatgatgtggggccagtttggggtcaggatctgaaacacacacatgtacacccacattcaggcactcacacaccaatgcatcagggctgggctgggcctgggaggcagaaagaaggctggaaatcccacaatgaatcacctctaccccaggtttccttcaacctcaggaggcccacttgtcagataaatcaaggccccttggccgggtgcggtggctcacgcctgtaatcccagcactttgggaggccaaggcgggcagatcacctgaggtcaggagttcaagaccagcctgaccaatatgatgaaaccccgtctctactaaaaatacaaaaattagctggtgtggtggcatgcacctgtaatcccagctactcaggaggctgagacaggagaattgcttgaacccgggaggcagaggttgcggtgagctgagatcgcgccattgcactccatcctgggcaacaaaagcaaaactctgtctcaaaaaaaaaaaaaaaaaaaaaaatcaaggcccctccaggctgcagagagactagaggggtcacaagagtagccactgattatggagcagggccggctctcatgagttgtagcattggcacagataggcagagcctctggccctagatcttaagcaaggctgggatgaggccagaggagaaggaacttggggcagggctgggcttgggctcaacgtcagagtcgacagcgttcactatggtggcactaatgatgctaataatgaagaccccgctcgctactactgttacaggaatggggtcccgatccagaccccaagagagggttcttggatctcgcgcaagaaagaattcagggtgagtccacagagtaaagtgaaagcaagtttattaggaaagtgaaggaataaagaatgactgctccataggcagagcagccctgatagctgctggctgccttttttttttttcagacggagttttgctcttgttgaccaagctgaagtgcaatgacatgatctcggctcactgcaacctctgcctcctgggttcaagcgattctcctgactcagcctcctgagtagctgggattacaggcatgtgccaccacacctggctattttttttttttttgagacggagtctcgctctgtcgtccaggctggagtgcagtggcgccatctccactcactgcaagctccgcctccctggttcatgccatgctcttgcctcagcctcccgagtagctgggactacaggcgcccaccactatacccggctaattttttgtatttttttttttttttttttttttagtaaagacagggtttcaccgtgttagccaggatggtctcaatctcctgacctcgtgatccactcgactcggcctcccaaagtgctgggattacaggcgtgagccactgtgcctggcctaattttttgtatttttagtagagatagggattcaccatgttggccaggctggtgtcaaactcctgacctcaggtgatccttccgcctcggcctcccaaagtgctgggattacaggcgtgagccaccgcgcccagcctggttgcctatttttatggttatttcttgattataggttaaacaaggggtggattattcatgcctcctcttttaagaccatataggataacttcctatcattgccatggcatttgcaaactgtcatggcgctggggagtgtagcagtgcggatgaccagaggtcactcttgtcgccatcttggttttgatgggttgggctggctgctgctgctttttttttttttttttggaggagtttcacttttgtcgcccaggctggagtgcagtggcgcaatcttggctcactgcaacctccactccggggttcaagtgtttctcctgcctcagcctcccgagtagctggaattacaggcgtccgccaccacacccagctaatttttgtatttttggtagacaatgtttcaccatgttggctaggctggtctcgaactcctgacctcaggtgatctgcccacctcggcctcccaaagtgctgggattgcaggcataagccactgcatccggccgtgcaggcttctttactgcgatctgttttattagcaaggtctttatgacctgtatcttgtgccaatctcctatctcatcctgtgacttagaatgccttaactgggaatgcagcccagcaggtttcagccttatttcacccagctcctgttcaagatggagttgctctggttcacaggcctctgacactactaataaaaagtgctgtgtgtggggctctgagctaaggttttatgtgcctgtgcctgtggttattttttttttcctttttttttttttaatcactgggatttgttaagcaatgttctacagcagaagtcagagaacctcagcttatgaactggatgtctgtttttgtaaaactgttttttgaggtgaaattcacctaacacaaaattcaccattttattatttatttttttttttgagaccgagtctcactctgttgctcaggctggagggcagtggcgggatcatggctcactgcagcctcgacctctggggctgaagggatccccgcccccagcctcccaagtagctgggactacagatgtgtgtcatcacatccagctaattttttgattttttgaagagatggggtcttgctttgttgcttggactggtctcgaactcttgggctcaagtgatcctcccaccttggcctcccaaagtgctgggattacaagtgtgagccatcacacctggccaaaatttaccattttaaactgtgtggtttagaggcacttagcatatttacagtgttgtgcagttgtcacctctatctagttctaaagaatttgcatacccctaaaagaaaaccctgtcctcatcagcagtcattcctcattcacccttcccctgcccctggcaaccacaaacctgctttctgtctctatggattcgcctgttctggacatttcagatcaatggaatgtcacactatggccttttgtgtctgtctttttttttttttttttttactcagcatcatgttttcaaggttcatcatcatagcctggatcagtgcttcattccttttcagggctgcataatattccattgtgggaaatgatcacgatttgtttaggtgattgaatgtttattggaacacacttccttccattcatttacatttctatggctgttttcctgctataatggctgagtcacaaagcagaaactattgactatctggccttgtccgcatcagcagtcactcctcattccccctcccacagcccctggcaaccacaaatctgctttctgtctctatggattcgcctgttctggacatttcagatcaatggaatctcacactatggccttttgtgcttgtcttttttttcacttagcatcatgttttcaagcttcatcgttatagcctggatcagtgcttcattccttttcagggctgcatagtattccattgtatgaaaggatcacaaattgtttaggtgattgaatgtttattggaacacattcccttccattcatttacgtagctatggtggctgttttcctgctataacagctgagtcacaaagcaaaacatatttatttactatctgggctttttttttttttttttttttgagatggaatctcgctctgtcgtccaggctggagtgcagtggtgtgatctcggctcactgcaacctctgcctcccaggttcaagcaattctcctgccctgcctcagcctggctcttttttttaattctttttttttgagacagagtctcactgtgtcacccaggctggaatgcagtggcacgatctcggctcaccacaacctcacctcctgggttcaagtgattctcctgtctcagtctcccaggtagctgggactacaggcatgtgctaccatgcccggctaattttttgtattttttttagtagagatggggtttcaccatgttagccaggatggtctcgatctcctgacctcgtgatccgcccgccttggcctcccaaagtgctgggattacaggcatgagccaccgtgcccggcctatctggccttttaatacaaactttgctgacccctgccgagccagcccgcctggattcaaatgcctatgctgctgcttactggctggagaaggtggctttatctctagtcttcattttgtccatctctaaaatggaagaatagtaccaactgcaaagggtgactgttagggttaaatgagttgatacttgtataaagtgcttaaaacagtgcctagcatggctgagtgtggtggctcaagcctgtaatcccaacactttgggaggctggagtgggcggatcacctgagaccaggagttcgagaccaccctggccaacatagtgaaacctcatctctactaaaaatacaaaaattagccaggcgtggtggtgtgtgcatataatcccatctactcaggagtctgaggcaggagaattgcttgaacccgggaggcagaagttgcagtgagccgagattactccactgcattccagcctgggcaacaagagtgaaactctgtctcaaaattaaacaacaacagcaaaaacaacaaaaatcccacacacacacacacacaaaaacacgtggaatgcacttgatgagtagggagtagaggatggtgatgtcctcggttcctgttgtcccacccgcctgccccagcctccccagcaaatgtttagcccagcccatgggaaaaatccatttaattattgtcatggctggattcccatctcctagaggagtccagactcatagtcatgcattatttctccatctggggcacctgtccaagcccaaggcttccctgctggcccctggtcttccagtagccagctgggccttagggctgggcctggagccgatctggaaccacagccaaatcatgaaagccaaggtcagccagcccccaaatcagtcgagcccaattcactaaaaagagactcaagtcatgacatgagccagcgaccgtgcggcccccagctggggcttttctgccattcccagtgggcagaagttgacttcaattgcatctttctgggacatcagaggtgagatttaatctctcaggcaactggtcctggaactggggaggacggagtttagtaatttgagatgtgggatactgtagagatatggtgagcttagctcttgccagtatgcgaggggccaagactgagtgtggggggatggggccatatcttagcgcttcctggtggaatatttacagagcacacacgggctcttagctgtcatcaccctgcttcagagaatgacacagggcaaagggctttaaacatatcttctatagaaaatcccaaacatattcaaaagtagagagaattgtaaaaaacccctacgcataccgatcaccgaattgacatcttcaaatcacaattcatcttgtttcttctatactccacccattgtctctcttttgtgatattatctgctgttgacgatcattgccaggatctattaattcattagtaggaataacataatgacatttgagtgataatattcctccttcatgtattagctgaaatacttctttttattattattattatactttaagttttagggtacatgagcacaacatgcaggtttgttacatatgtatacatgtgccatgttggtgtgctgcacccattaactcgttatttagcattaggtatgtctcctaatgctatcccttccccctcccccgaccccacaacagtccccagtgtgtgatgttcccattcctgtgtccatgtgttctcactgttcaattcccacctatgagtgagaacatgtggtgtttgtttctttgtccttgcgatggtttgctgagaatgatggtttccagcttcacccatgtccctacaaaggacatgaactcatcattttttatggctgcatagtattccatggtgtatatgtgccacattttcttaatccagtctatcattgttggacatttgggttggttccaagtttttgctattgtgaatagtgccacaataagcatacgtgtgcatgtgtctttatagcagcatgattgataatcctttgggtatatacccagtaatgggatggctgggtcaaatggtatttctagttctagatccctgaggaatcgccacactgacttccacaatggttgaactagtttacagtcccaccaacagtgtaaaagtgttcctatttctccacatcctctccagcatctgttgtttcctgacttttgaatgattgccattctaactggtgtgagatggtatctcattgtggttttgatttgcatttctctgatggccagtgatgatgagcattttttcatgtgtcttttggctgcataaatgtcttcttttgagaagtgtctgttcatatcctttgcccactttttgatggggttgtttgtttttttcttgtaaatttgtttgagttcattgtagattctgcatattagccctttgtcagatgagtagattgcaaaaaatttctcccattctgtaggttgcctgttgactctgatggtagtttcttttgctgtgcagaagctctttagtttaattagatcccatttgtcaattttggcttttgttgccattgcttttggtgttttagacatgaagtccttgcccatgcctatgtcctgaatggtattgcctaggttttcttctagggtttttatggttttaggtctaacatttaagtctttaatccatcttgaattaatttttgtataaggtgtaaggaagggatccagtttcagctttctacatatggctagccagttttcccagcaccatttattaaacagggaatcctttccccatttcttgtttttgtcaggtttgtcaaagatcagatagttgtagatatgcagcattatttctgagggctctgttctgttccattggtctatatctctgttttggtaccagtaccatgctgttttggttaccgtagccttgtagtatagtttgaagtcaggtagcatgatgcctccagctttgttcttttggcttaggattgacttggcaatgtgggcttttttttggttctacatgaactttaaagtagttttttccaattctgtgaagaaagtcattggtagcttgatggggatggcattgaatctgtaaattaccttgggcagtatggccattttcacgatattgattcttcctacccatgagcatggaatgttcttccatttgtttgtatcctcttttatttcattgagcagtggtttgtagttctccttgaagaggtccttcacatcccttgtaagttggattcctaggtattttactctctttgaagcaattgtgaatgggagttcactcatgatttggctctcagtttgtctgttattggtgtataagaatgcttgtgatttttgcacattgattttgtatcctgagactttgctgaagttgcctatcagcttaaggagattttgggctgagacgatggggttttctagatatacaatcatgtcatctgcaaacagggacaatttgacttcctcttttcctaatcgaataccatttatttccttcttctgcctgattgccctggccagaacttccaacattttgttgaataggagtggtgagagagggcatccctgtcttgtgccagttttcaaagggaatgcttccagtttttgtccattcagtatgatattggctgtgggtttgtcatagatagctcttattattttgagatacgtcccatcaatacctaatttattgagagtttttagcatgaagggttgttgaattttgtcaaaggccttttctgcatctattgagataatcatgtggttttggtctttggttctgtttatatgttggattacatttattaatttttgtatgttgaaccagccttgcatcccagggatgaagcccacttgatcatggtggataagctttttgatatgctgctggattcggtttgccagtattttattgaggatttttgcatcaatgttcatcaaggatactggtctaaaattctctttttttgttgcctctctgccaggctttggtatcaggatgatgctagtctcataaaatgagttagggaggattccttctttttctattgattggaatagtttcagaaggaatggtaccagctcctccttgtacctctggtagaattcggctgtgaatccatctggtcctggactttttttggttggtaagctattaattattgcctcaatttcagatcctgttattggtctattcagagattcaacttcttcctggtttagtcttgggagggtgtgtgtgtcgaggaatttatccatttcttctagattttctagtttatttgcatagaggtgtttatagtattctctgatggtagtttgtatttctgtgggatcggtggtgatatcccctttatcattttttattgtgtctatttgattcttctctcttttcttctttattagtcttgctggtggtctatcaattttgttgatcttttcaaaaaaccagctcctggattcattgactttttgaagggttttttgtgtctctatttccttcagttctgctctgatcttagttatttcttgccttctgctagcttttgaatgtgtttgctcttgcttctctagttcttttaattgtgatgttagggtgtcaattttagatctttcctgctttctcttgtgggcatttagtgttataaatttccctctacacacttctttgaatgtgtcccaagagattctgctatgttgtgtctttgttcttgttggtttcaaagaacatctttatttcgttatgtacccagtagtaattcaggagcaggttgttcagtttccatgtagttgagcggttttgagtgagtttcttaatcttgagttctagtttgattgcactgtggtctgagagacagtttgttataatttctgttcttttacgtttgttgaggagagctttacttccaactatgtggtcaattttggaataggtgtggtgcggtgctgaaaagaatgtatattctgttgatttggggtggagagttctttctttcttttcttttctttttttttttgagacgagtctcgctctgttgcccaggctggagtgtagtggcacgatctcggctcactgcaacctccgcctcccaggttcaagcaattctttgcctcagcctcccaagtggctgggattacaggtgctcaccaccacgcccggctaatttttttatatttttagtagagacggggtttcaccatcttggccaggctggtcttgaactcctgaccttgtgatccacccgccttggcctcccaaagtgctgggattacaggcatgagccaccgcgcccagcctcggggtggagagttctgtagatgtgtattaggtctgcttggtgcagagctgagttcaatttctggatatccttgttaactttctgtctcgttgatctgtctaatgttgacggtggggtgttaaagtctcccattattattgtgtgggagtctaagtctctttttaggtctctaaggacttgctttatgaatctgggtgctcctgtattgggggcatatatatttaggaaagttagctcttcttgttgaattgatccctttaccattatgtaatggccttcttttggtctttaaagtctgttttatcagagactaagattgcaacccctgcctttttttgttttccatttgctcggtagatcttcctccatccctttattttgagcctatgtgtgtctctgcaggtgagatgggtttcctgaatacagcacactgataggtcttgactctttatccaatttgccagtctgtgtcttttaattggagcatttagcccatttacatttaaggttaatattgttatgtgtgaatttgatcctgtcattatgatgttagctggttattttgctcattagttgatgcagttctatagaaagaaacagtctcggctgggtgcggtggctgacgcctgtaatcccagcactttgggaggccgaggtgggtggatcacctgaggtcaggagttcgagaccagcctggccaatatggcctactaaaaatacaaaaattagctgggtgtggtggtgcatgcttgtaatcccagctactcaggaggctgaggcaggagaattgcttgaacttggtgggtggaggttgcagtgagctgagatcacgccactgcactgcagcctgggtgacagagcgagactctatttcaaaaaaaaaaaaaaaaaaggaaagaaacagtctctcatcttccatttggttacccagtggtaccattcatatgggaaaggcaagatgagcacttgattcttgttcttttctagtttatttatttatttatttatttgagatggagtttctctcttgttgcccaggctagagtgcaatggcatgatctcagctcactgcaaactctgcctcccaggttcaagcgattctcctgcctcagcctcccgagtagctgggattacaggtgcccgccaccatgcccggctaatttttgtatttttagtagagacggggtttcaccacgttggccaggctggtctcaaactcctgacctcaggtgatctgcccgcctcagcctcccaaagtgctgggattacaggcatgagccaccccgcccggcccgtttatttatttatttatttatttatttatttatttatttatttatttatttttgagacagagtctcgctctgttgcccaagctggagtgcagtggcatgatctcggctcactgaaacctctgcctcccaggttcaagtgattctcctgcctcagcctcccgagtagctgtgattacaggcacctgccaccacacccggctaatttttgtatttttagtagagacggggtttcaccacgttggccaggctggtctcgaactcctgatctcaggtgatccaccggcctcggcctcccaaagtgctgtgattacagacataagccactgcgcctggcccgtttatttatttttatttatttatttatttttgagacggagtctcgctctgtcgcccaggctggcatgcagtggcatgatctcggctcactgcaacctctgccttccgggtccaagcaattctctgcctcagcctcctgagtagctgggactacaggtgcgcaccacctcggctaatttttgtatttttagtagagatggggtttcaccatcttggctagtctggtcttgaactcctgacctcgtgatccacccgcctcggcctcccaaagtgctgggattacagacatgagcgcccagccttgggtcccttaatatcctcaaaaagtaaacactgagattttttttcccttatagatttacgatctcattaaactaatgaaatatgtcaatacattgcagtttttatcattactgataatcaaattggcttccttctttggctggtgggagtctctttatgttgactcctgtgttcttttggcatggctcagagtcctaggtggctttcttgcttcatgacataacaagatgttctaaccagatgctgtgggaacatcttgttcatttcctgccacaggcctgggatcagcaatttctcccaggaacccttattcctttgattggaaaatgaggaatcagctccacaatcaaggagctgaagtgctcatggctaataagttagttttgtttctaggtattttcactggacacaaatagaaaatcccccactattttttttttaaagacggagtcttgctctgttgcctaagcaggagcgcagtggcgccatctcggctcactgcaacctccacctcccgggttcaagtgactctcctgcctcagcctcccgagtagctgggactacaggtgtgcatcaccacgcccagctaattttcgtatttttattagcgacggggtttcaccatgttggccaggatggtctcgatatcttgacctcgtgatctgcccacctaggcctcccaaagtgctgggattacaggcgtgagccactgcaccagccccccacctattttttctttttgagaggcggtctccatcacccaggttggagtgcagtggtcccatctcggctcattgcaacctctgcctctcaggctcaagtggtcctcccacctcagcctcccaagtaactgggaccactggcgtgccaccatgtccagctaatttttgtatcttttgtagagacagggtttcaccatgttgcccaggctggtcttgaactcttgagctcaggtgactgcccacctcagcctcccaaagtgctgcgattataggtgtgagccaccatgtctggtctcccactacctttttttttaattttttaaaaatatatataacatgggccaggtgtggtggctcacacctgtaatcccagcaatttgggaggccgaggcaggtggatcacctgaggtcaggagtttgagaccagcctggccaacatggtgaaaccccacctctactaaaaatacaaaaattagccgggcatgatggtgggcacctgtaatcccagctactcaggagcctcaagatatatatatatatatgaaatgagtttgtattgatgcttccaattcatattttggactaaatgccttttatttagcctgatcaatttgatacctgcatttttattttcccacactgaaaatccaaattctcaccaccaccaacacattcactcatttgctttattccacaatacacacacattaatcccagaagaacacaccaacagtatcttaagtgatatggttatgggaaacagtttaacatttttcccctgtcccttttcattttggtatattccactagggatgtaccattaaattactgagctaaaatactttctttctgattggttatgccggtaaccagaagtgtttaatttctagggccttttttttgagtgtagaaagtatttactttaaaaatagctacaatactcgggaggctgaggcaggagaatggcgtgaacccgggaggcagaggttgcagtgagccgagatcgcgccactgcactccagcctgggtgacagagtgagactctgtctcaaaaaaaaaaaaaaaaaaaaaattacctacaacaataaaaacaacatctcacaataagattgtgcattataactgcaactattaatagaaccactgttcaattagaaaatacctgaaatagggctgggtgcagtggctcatgcctataatcctagcactttgggaggctgaggcaggtggattgcctgagctcaggagttcgagaccagcctgggcaacacggtgaaaccctatctctactaaaatacaaaaaattagcggggcttggcggcatgcgcctgtaatcccagctactcaggaggctgagacggctgaattgcttgaacctgggaggtggaggttgcagccagccgagattgagccattgcactctagcctgggcgacagagcaagactccgtctcaaaaaaagaaaaaaaaaaaagaaaagaaaatacgtcaaataacaggattaataatgtcataataacaattatcattaatctattattatttattattattatttttgagacagagttttcgctcttgttgcccaggctggagtgcaatggcacgatctcggctcaccacaacctccgcttcccaggttcaagcgattctccttgctcagcctcccgagtagctgggattacaggcatgcaaccaccatgcttggctaattttgtatttttagtagagatggggtttctgcatgttggtcaggctggtctcaaactcccgacctctggtgatctgcctgcctcggcctcctaaagtgctgggattacaggcgtgagccactgtgcccagcctgttattattaatattatcgttaatattaatctgttactattgcaaacttcacctattacctccatcccccacccccatttaaaaatgtcattataaatatagtaccttaggccaggcacagtggctcaggcccataatcccagcactttgggaggccgaggggggtggatcacctgaagtcaggagtttgagatcagcctggtcaatatgatgaaacctcgcctgtactagaaatacaaaaagtaaccgggcatggtggtgcatgcctgtaatcccagctactctggaggctgaggcaggagaatcgcttgaacccagcagtgggaggttgcagtgagccaagatcgtgacactgcactccagcctgggcgacagaacgagattttgtctcaaaataaataaataaattaaaaaataaaaataaaaaataaataaatatagtaccttaccacatgcagctttgagttactgggtcattcagacgaagtaataccacattacttttttactgtggtaaaatacacataacatacaatttaccattttagccatttttacgcgtacagttctagggcactgagtacattcacgttgtgcaaccatcaccaccagccatctccaaaactttttggcttccccagctgaaactctgtccccgttaaacattaacttcctattccctactccccgccaagcccctggcaaccatcattctactttctgtctctatgaatttgactgctgtagttacttcatatcaatagaatcatacaatatttgtccttgtgactggcttatttcactttcctataataagataaacgcatatataattcagccagatattgccagttttctctccccagggattactttgcattctccattagttaagcatgtgagtgtgtaaaatactcccaagccttttcatttgacctggcagactcctatatattctttaaaacccacctctggctgggcgcggtggctcaagcctggaatcccaacaatctgggaggctgagattaataagggaatttacacaacactttcctgaggacagaccacgttcacacctacctccctgttggagcctcaggaccaccttaagagggaaggaggaggaccactcccattttacagttgagaaaaatgaagcacagagacgctaagatgtgtacctaaggccacagagctggtgtcagagccaggcctagatacctacctgcctgcttttcctgaaggggaattcttattaacagagggacaaggttgcttctgataggctgtaggagccggggtgcagtagggggtgggggtggggggaaggggagggaagaatctgattggccgaggaaccaaaaagtggaagtagttggtagggtgggtagacaagcaaagtctgattggctggaaagtaggatatggaagtctgattgggtgagagttaagagagtagtttaattgactaaggcagactctgattgactgaggggttggagagcagcgtttagttgcgggagggggaagagggcggagtctaatcggatgaaaaacaggagactggggtttgattgactgagggatatgagagcatttaatttgctgaggtgtgggagggtggaatctgattggctgggggaaactcagcatgaagtttccccgggggtgttagcaatgtcatttctgctctccttcacaaatcccgtgtctctgggccctggtagaaggaggtggagattaatctcctaggactatggggaaatggaggcagatgtgtgtggaggaggggagggggctgagtcactccaggcaaaggccagagaggacacctccccaaccatacctgctgagaaagaatcttgttctccacctcccatcacgcctcctgcagagtgaccactaggatttatggcccagaagagagaggtgtcacccagcccctctataattcccagggaggaagcaggggtcctcttcattccttccccttccccagcagaaccccttctccccaatcctttcccttcctaggggaccacactcttcatctctctagtttctgatgacaaggacctctcctccctccacctgcctgcccaaaggcatcttcttgcacccactgagtttttttgttttttgttttgggacggagtctcgctctgtcgcccaggctggagtgcagtggagtgatctcggctcactgcaacctccgcctcccgggttcaagcgattctcctgcctcagcctcccgagtagctgggactacaggcgcctgccaccacacctagctaatttttgtatttttagtagagacggggtttcaccatgttggccagtatggtctcaatctcttgaccttgtgatcctcctgcctcggcctcccaaagtgctaggtttacaggcgtgagctacctcgcccggcccccactgcgtttttatcgctattgtcttcctccaccgggagcttctctcccctcccttcctccaccccaatcttcctgtttgactgtctttatctctcttccttcacccttcttcttctcttctactcactccgttaaaaactccagcctaggccaggcacggtggctcatgcctgtaatcccaacactttgggaagctgaggcttgagcccagggcaacatagtgggatcccccctgcccatctctacaaaaaaattaaaaaattagctgggcgtgttggtgagcgcctgtagttttagctacttgagaggctgagatgggaagattgcttgagcccaggaggtcgaggctgcagtggactatgtccgcaccactgcactccagcctggatgacagagtgagaccctatctcaaaaacagaacaaaacctccagcctaaatgatgcccaggtggaaaaccttggagttacatccagtctgtcagcaaatcccatcagctccaccttttattaaacaaatcccaaactctaccacctttcacaactctaagttccttcagggttgggcagtgaggaagcaagctcttgctccccgtttactctgttcatgatattgcagccagaggaagcctgttaaaacctctcaggggacatcccttctctgcctagaaccctgtatggctcccaccttcctcagagtaataacctaagccctctcagtggtcccccaggtcctagacaacctgtcctgtcacttccctgcatttatctcctcccggtatccccctcactcactctgctgcagcttcactggcctcttgactgttctttaaggcatggtccagcctcaggtcctttacacaggctgtgccctctgcttggaatgcttaagatccctgttcaaatatcaactcctcagagagggcttccacatctccttaccttgctaggttttgtcccatagcacatatcacatagattatacacttttaatttatgtgtttttgtttattcactgcagagcaatgcctggtaccatgtgcaaacttggcatttgttgaatgaatatgtgctatgtgacagctggggctggggacaaggcagagaaagagaaagatcccttttacctgcgtggagtttacagccctatccagggctaaacaaatcattccaagaggcaggcacggtggttcatgcctgtaattccagcactttgggaggccgaggcgggtagatcacctgaggtcaggagttcgagaccaacctgatcaacatgctgaaaccctgtctctactaaaaatacaaaattatctgggtgtggtggtgcatcccagctacttgtgaggctgaggcaggagaatcacttgaactcgggaggtggaggttgcagtgagccaagaccgcgcattgcactgcagcctgggcagcaagagcaaaattctatctcaacaaaacaaaacaaaacaaaaacaaaacaaaaaaatcattccaagagcaattttactgggagcgaggacactcaggggctgtggctgcattgagtatgggctggaactaagcccagtgactggggaagccctcagaaaaaatggccttaagtaggagttagttgggtgggtgagaggaagataattccaagcagagagaagagcatgtgcaaaggatttaaagttggagagatggtctttgatgggtttggcaaaaatggtcccaagtggcttgtgtgtggatggggagaaggaaagtggccagcacatgttaaaaggggccatttaacaccccacttgcctctcacctttgaattgctttccttccttccttccttccttccttccttccttccttccttccttccttccttcctttctctcgctctctctctttttttcttttttttttttttcggagttttgctcttgttgcccaagctggagtgcaatggcatgattttggctcactgcaacctccacctcccaggttcaagcaattctcctgcctcagcctcccaagtagctgggattacaggtgcgtgccaccatgcccagctaattttttggtatttttagtagaaacggggtttcaccatgttagccaggctggtctcgaactcctgacctcgggtgatctgcctgccttggcctcccaaagtgctgggattacaggcatgaactaccatgcccagctgtgttgctttctttgtttgaaatctctgatatcacctgttctgtttccacttttctgcctcactgtttttgtgtcccaggaggctgatgtatatggaccactcaatgagctcctttgtcttgtggcttccagttgggttgaaacagcagggagccatagcaggcattggagggagggaggaaagtgaggttaggttatttgtaactcatcttctttccatgcaggctggctgtgtccctccaccggaggttcagaactcttgacaggtggacctctttgcatagccctgtctggtccaggttctagcaactttagttccttggccccaggtcctaggggtggtaactaatttcagctgttaccagcccctggtgtgctgcactatccctttgaaaatagtgctttttattaaactctctacaaattactccacttaagtgttcggtctgtttcctgccgagttcttttttatttttattttttttgagatggagtctcactctgtcactcaggctggagtgcggtggcacgatcttggctcactacaacctctgcctcccgggttcaagtgattctccttcctcagcctcccgaatagctgggactacaggcgtgagcccccatgcccggctaatttttgtatttttagtagagacagggtttcaccatgttgacgaggctggtctcgaattcctgagctcaggagatctgcccgcctcggcctcccaaagtactaggattacaggcataagccaccgcgcctggccctcttttgtttttagagacagggtctcactctgttgctcagactggagtgaagtggtgcaattgtagctcactgaaacctcaaactcctgagctcaagcaatcgtcccacctcagcctcctgagtagctgggactacaggcatgtaccactatgcctaatttgttattttttataatttttacaaaaaattattttttttagagatggggtctggctatgttgctcaggctggtcttgaactcctggactgaagcaatcctcctgcctcgacctcccaataataataattatatatataattattatatatattatatataataattattatatattatatatatataattattatatatatataatatatatatatataaagtatttattttaattgaggtgaggccgggcacagtggctcatgcctgtaatcccagcactttgggaggctgaagagggaggatcacttgaggccaggagtttgagaccagcctggcgaacatggcaaaaccccgtctctactaaaaatataaaaaaattagctggctgtgtgtcacaggcctgtaatcccagctacttgagaggctgaggcacgagaattgtttgaacccaggagccggagtttgcagtgagttgagatcgcaccactgcactccagcctgggcaacaggtgagactctgtctcaaaaaaaaaaaaaaaaaaaaaaaaaaattgaggtgaaattcacataacataaaattaaccctttaaagtgtagaattcagtgacatttagtgcattcacaatgttgtgcaactatcacctttatctagttccagtgtttttgtcaccccaaaaggaggtcctataaccactccccctgggtatgggcttctctctccatcccccctcccccagcccctggcaacaactactccactttctgtctctgtgaattcacttagtctgaatatttcatataaatgtaataatgcactgtgtgaccttttgtgtctggtttctttcactcagcacaatgtttatgaggctcatccacattgcggcatggatcagggttttatttatttttatttgtattttttttttcagacggagtctcactctgtcccccaggctggagtgcagtggtgcgatcttggctcactgcaatctttgccttccgggttcaagcgattctcctgcctcagcctcccgagtagctgggattacaggtgcccgccaccgtgcccagataatttttgtatttttagtagagacagggtctcaccatgttggccaggctggctcaacctcctgacctcaggtgatccacctgcctcggcctcccaaagtgctgggattacaggcaagagccacctcgcccggcctttattcttttttatgactgagtaatattccattgtatggatggaccacagtttgtttatccattcatctgttggtggaatttgggttgtttccacctttggctataataaatcgtgctatcccgagcactcctctacaattacgtgtgagtaactgttttcttttctctttctttctctttatctctctctctctctctctctctctctctctctctctgtctcttctttctttctttttctttttttttgagacagggtctcattctgtagccaggctggcgtgaagtggtacaatctcagctgactgcaatctcagcctcccagtctcaagctgtctatcctcccacctcagcctcccaagtagctgggactataggtacgcacatcatgtccagctaattttttatattttgtagaaatgaagtcttgctatgttgttccccaggctagtctggaactcctgggcttaagtgatgctctcttgcctcagcctcccaaagtgctgagatgacagctgtagaccactgtacctggcaagtacttgttttcagttattgtgtgtgtatacctaggagtggaatatctgggtcctatggtaattctgattagctttttgagaaattcccaaactgttttccactgtggctgaaccattttacgttgccaccagcagggtatggcgagatccctcttctttttatctttgactccctgccatgacctgccacatccactcccagacagctttctactaccatttcccaagtccagccacagcctccacttcctcccctcccacttcaacctcaccccactgagccctgggctgtggcaggctgagggctctggtggcatgggaaccacacagctctagagcttgggttccttgacgtctaggtgccagtgatggtccctactaccactcttctcaaactccatctccagctccagctcagtgctgctgcctgtcctctctataaatgtagctattatctctgaggtcaggagtttgagaccagcctggccaaaatggcaaaaccctgtctctactaaaaatacaaaaattagccgggcgtggtggtgcaagcctgtaatcccagctactcaggaggctgaggcaggagaattgcttgaacccgggaggtggaggttgcagtcagccaagatagcaccactgcactctagcctgggtgacagagcaagactctgtttgattaaaaaataaaataaaaggccaggcacggcagctcatgcctgtaatcccagcactttgggaggccaaggcaggtggatcacttgaggtcaggagtttgagaccagcctggccaatacggcgaaaccccgtctctactaaaaatacaaaaattagccgggcttggtggtgggcacctgtagtctcagctactcgggaggctgaggcaggagaatcgcttgaccccgggaggcggaggttacagtgagccaagattgtgccactgtatccagcctggacaacagagcaacagagtgagactccatcttaaaaaaaaaaaaaaagtggctgtgatccccacttctgccctcccctcctcttctctgcccacctccctcctgagtgatctcgctgacctactgccatgccatccaccgtcttcccaaggcaggtgactcacagatgcaattctcaggaggtgccctcacgctgagcccaactgcctcctggatgtctccctgaatgtcatcccatgagacccacgagacttttagactgaaggtgacccacggtttcccaatcttagcactgtcaacatttgagcctggattattctttgggggtgggggtgttctggatgttgaataatatctctggccttcacccactagatgtcagttgcaccaccctgaattcccccacccccacctctaccccccacccagcagtatgatctcctgatgttgctaaacattccctggcggaaaactctactctgctgggatggccccaatcaactgcaaactcaaacagctgatgtttgtccagcctgtgccctgtgccaggagtggggctgaacaccacctcatcacatgggcttcttctgcattttatgcatagggagatggaggctcagagcagccatgtgactagctcaaggccacacatccacgaagcccactcttagtgctccaggccctttcacttactcctccttcctggtctccagctctttgagagcagagaagccaggcagatggcttcttttccttctctcttccctagaaccccgtatttagccagtggtcagtggagatgacctccgggacctcatccttaaccccttcctgggtctcagctacccccaccctttgtctctgtcccctgcagccactggaggggtccctctcaaacttcactctatgtggatctctgcattttccaaagtgcttctagtaagctcccccttggccagaattactggcaaaacaaaattcatatccctaaaaaataggctttcatgctgcgttaattatgaataaaaaattaataaaataagctcttcctcagaagtaaaaaagattaaagacacaaataaatataaatatttttttttaaaagttctaggagctgggagaatggcttgagcccaggagtttgagaccagcctgggcaacatagtgagaccctgtctctaaaaaaatgaaaaaaaaaaattagctgggtgtggtggcacgtgtctgtagtcccaactacccaggaggctgaggcaggaggatggcttgagcccaggagtcaccccagcctggatgacagagtgagaccaatcaactaacagggggcacctcccctactcaagcaccatccatggctccccactgcccaccagatcaagatccagccattcaaactggccttcacagtcaactcctgcatccctccagcctccacacctctcacactccaaggccagggaaagccatctgctaagtcacaccctccagtttctctgtgcttgagctctaccccctctcctgcacttgttgaaatccaacctctccatgcagtcccagctcaagtgtcacatcctccacgtcgccttccctgacctcatgtctgcctcctccaagcagcaaaacttcaattacttgtgtctcctcttcttcaccaggagacatgccccacacctcccacgccctctttccaagggcccagcaccaaatgagagcgtattcttagaaaaaagagggataaggaagtcttctaagtttaccacctgctggggcaagtggagattcttgtcttctcatctgtctgcccacgtgctaaggtcagccacacatccacccaccgactccggaggacagacacatccagaggcggagctgactctgtctccacacatctggagtagacgggttggccaaggacaacatcctggtcagagggtcaaggtgtctggcagtgggtggggaggagtggcggagggcgggttggcggggagcagaaccagtctggtgctgcttgttgaggttggaggtcttcctggaggaagaggctgcagagcctccaggggtgggtgccggggaagcttaggcccaggatccagagagaggggaagggctggttcccaagggctggtggagccagagaattcctgagggccccagaggaggcttctcgggggggtcagtggggccccagggggtgatggtttagagatcgctgtccaagcttgggagcaaacctggaagtaagggccatggggggtgttggtgtgggaggagtgtggtccagagcgggacttgggcgctaatgcggcccagcagtggcaggagggcggggagcctgatggtttgggacttctaggtgtccaagtctctgtctctcttcatctctccatctcagtctcagtctctctctctttccatcgctctccacccctccacacgcctatttcttgttctctccttttctagggggcagcgctggagtccccgcccagaaccctgcgggagcccggggcgggatgtccgggggcggacccctcggcacggccgggcggggttaaagggttgggccgtgggacggcgcggtcagatcccaggtagtggcgccggtggatccggatcgagggcaggaggctgagacccgcgggtgagtgcgcgcgtggtgagggctgtaacctgagcgcggccgcggcgctgcgctggaacccgaggctcgcgcggttcggtgctggcggggcaagggcgaaggtctgcgcgcggcggcgggcggggcgcagccggccacggggacccccccaggacccaggacggggctgcatgcccggggcactcgtggggagaggggcacgtgggtgtgtccccgacgtttgctgcatttgtgagttgttttctttttttttttttctgtgtgcgcctcggagtcctaggcgcatccttttctctgggtatctgtgatgggcagggggcctccaaaagacccctctggtagtcaggacatcccagatgggttcaagccccgccctgggacgcctctttggggctgaatggggattcgccctgagatttcaccactgcacgttgtcttgacggggaggttgtagtacattcaaccgatggggttaggcttgtggttcaactgctatcaggaaccctctgcccatccatgccagacgcagagcccctctatgaaaagacggtgttcttctggccccgagagttggctctgagggttgtgtgaggtcctggggttggtcccaggtgatcttcgtctgatagatgctggaaggaagatgttttctggcctcccaggggcctggcccagcctgggtatgcaagttggccgaggctggccacctggggagtcgcaggctggagaggcctaggctcagggcatctctcctggttcatctgcccgctcacagctcattcatgcactcattgtgagtctcaccgccctgtaggcaaaggagatggccagggctggctgcgtacccgaaattcctcctaccctgtgccccttgctccaccccttatttctaggtcctggagctgtgcccagccagggctggcagcatcaaactccttcttgtgtaactccaaaccccaaagagaaggaacctccccaaatcttccctaccaccctcattttacaggcacggaaactgagggccagagagaagaagcctgtgcctgtggatacccagtgcccagtgggagagctgggatttgaaaaaacaagccctgtttgaccccaaagcctcagtccactttccgatgtccccggcatcaccaaatggcccagcttgggtttctgaacagtaacattaactctggcctggtgtctggcggtgacccaggttggtatctgcagaggggcttggatgacttgagaggcattcagggaatgggacccatctctccttccttccttccttccttccttccttccttccttccttccttccttcctttctttctttccttccttctttctttctttctttctttcttttctctgtctctctctctttctttctttctttctttttttgttgttgttgttgagacagggtctcactttgtcacccaggcaggagtgcagtggcataatcatagctcactgcagcctcgatctcctgggttcaagcaatcctcctacctcagcctcctgagtatggaggactacaggcatgcaccaccactcctgtctactttttgtatttttggtagggatggggtttcaccatgttgcccaggctggtcttgaactcttgggctcaagtgatccacccgcctcagcctcccaaagtgctgggattacaggcatgagccactgcgcctgactcatctctccttgttgataaaacttggacctgattctccaaaccccagatggccaggtcacaataatgaacgtgatggcagcaccaacggtaatgagagatatcattgatcaaaggcttactatgtgcctggaagattgcagccccatgaggtgggtaaatagggcttctgtcttaatggatgaagaaattgaggctcagagaggtgcagacactcacccgaggtcgcacagcaaagaggcagacctttatagaatcttttctgaggctcatgtccaggtgtggccacacttgggatggtgggcagaaacaattacaaccctgcaatggtctagattattagtggttttaaaacttctttttctgccaggatcccctttgggccaaggaaattattagcaaaaggtttgaatatgatcaaagctgcgataggactgtctcctttaccacatttgccaacttggccctgccctcattagtcataaatgactctgaagctctttctcagaaccttagaaatttagagtgctgagtggagactgaagacctagaagccaggctgagtgtggtggctcatgcctgtaatcccagcactttgggaggctaaggctggaggatggtttgagcccaggactttgagaccagcctggggaatatagggataccatatatatatatatatatatatttttttttttttttttgagatggagttttgctcttgttgcccaggctggagtgtaatggcgtgatcttggctcactgcaacccctgcctcccgggttcaagctgttctcttgcctcagcctcctgagtagctgagactacaggcatgtgccaccatgcctggctaattttgtatttttagtagagatggggtttctccatgttggtcaggctggtctcgaactcccgacctcaggtgatcctccctcctcccaaagtgctgagattacaggcatgattacaggcatgagccaccgcgcccagcactatattaattttttttaacaaaaaaattaaaaaaaaattagctgagcatggtggcaggcgcctgtagtcccagctactcaggatgctgaggtgggaggatcactcaagcccaggacggggaggttgcagtgagccaagatcacaccactgcactccagcctgaaggacacagcaagaccatgtctaaaaaacaaaacaaacaaacaacaacaacaacaaaacaacttagaagtcccctctcagctccagccttctggggtctggcactttgggggaatatgtgagtctctggggtaagccagccctctgatgttgaggaagccaaggtggcaccatgaatcagtggggacgggggcaggctgccttgactacaggcttggagtgaaaaggagggctgggatttggggtgatggggccagcgttggggtgctcttccatcaggctcctggctggtcccagcccctgcagttcaagaagaggcatgtatctcgtacctggcgtcggcctgggtccgtgccctccactccttcttgggagcccacacaccttgtataacaagtcctcagtgggtgaacggctgggccaacctgacaaaccagcgcgacctgggcgtgggccgggacacggagccagtcgctggctttcaccaccaccagataatgcgggccctggcagggcagggccacctctaccaaggcgggcctgctggatgagatcgggggccggtgtagatagggagtggacatgccagccgcccacaacattctgagggtgtcacctttgaattgctctcacttctatcaaatagcaataataggagtagtcatcatggctaacattttgtgagctacgtgacaaggcctttccatgcctcatttcactgagccgtcccaaaaaccttagggggtaggtcctgttattatcaacccatttcacagattggcaaagggaggctgatggcagggactgggttcacccaaggctgctaacctagggaataggagagctgagatttgaacccaggcctgttgaagtcaaaagtgaacattaaattaaattaaattaattttagtttttgagatagagtctcactctgtcccccaggctggagtgcagtggcaagattttggctcattgcaacctctgcctcagcctcccaagtagctggggctacaggcatccaccaccatgcccagctatttctttttttcttggtagagacagggtttcatcatgttgcccaggttggtcttaaattcctgacctcaagtgatcctccctcctcagcctcccaaagtgctgggattacaggcatgagccaccatgcctggcctgatttttttgttttttagtagagacggagtctcactatgttgcacaggctggtctcaaattccttggttcaagtgatcctcccatcttggcctcccaaagtgctgggattacgggcatgagccacttcacctggctgatacctttcctccattatctaaactccatagtttacattaggattcactctttgtgtcatgcagtaaactaatgaatttttataattgattcaattttttttgaatgggtgacatgtgctcatggtataggaaaccaaaacgactggaaaagtggatagtaaacttaagtttcccttccacccctgtcccgagttctttcaggccctttccagaggctgccaccatttttcctgggtcctcaaagcttttctctctctctctctctctcttttttgtattaccatttattggtgacaaacactaagttttactcgcattccatgaggagaaaaactccagtgtaaacgatgaatggaggcagtacttaactcgcaggggtaccaggctttccatatggaccacacacagagcctcagtgcacacacttcttttttcatttttatttttttgagacggaatctcgctttgtgacccaggctggagtgcagtggcatgttctcggctcactgcaacctctgcctcccgagttcaagcgattctcctgcctcagcctcctgagtagctgggactacaggcgaatgctgccacgccctgctaattttttgtatatatatatatttttttttttttttttttttgagacagagtctcactctgtcaccgaggctggagtgcagtggcgcgatctcggctcactgcaaactccgcctcccgggttcacgccattcttcagcctcagcctcccgagtagctgggactacaggcgcccgccacctcgcccggctaattttttttatttttagtagagacggggtttcaccgtgttagctaggatggtctcgatctcctgacctcgtgatctgcccgcctcggcctcccaaagtgctgggattacaagcgtgagccaccacgcccagcctaatttttttgtattttagtagagatggtgtttcaccgtgttgtccaggctggttgcgaactcctgagctcaggcaatccgcacccccctcggtctcccaaagtgctgggattacaggcgtgagccaccgcacccggcccagtgcacacacttctgtgtatagtaacacaacatcaaaagcaacacaactgtataaagaaacataggtcatacttttcagccctaatcgagatgtaattaatagtatcgagcactctggaaaatcagtctgcagttttatgtgaactatgtggagatcatatcctgtagtgtagtgaaagctaagtcctcaagagccgtatgtatagacacatgattttcttaaagaatatttaaaatggagatcaaagttcatttgtttaagtcctgtttgcattaacaaaaataaaaataaaataaaaatggaagcaaatgatcatctaaagtttaaaattcctaaattgtccaatttatacaactgtgggagacttattcaaggtttttgaaagtccaggactgtttcagctgaaccatagggcacgtaatttgcatcactgaaatggtgctgggttagtcaatgaaataaaaatgtctaactacatacacgtggatatgatctttgtcggttagattattgataaagtcagtctcagaaaagtttccaaactgtgcgatataattagatacagttgagaaactctcaaatgaaaattttatatagtgtcgtcgggcacggtggctcatgccagtaatcccagcactttgggaggccgaggcgggtggatcacgaggtcaggagttcaagaccagcctggccaagatggtgaaaccccgtctctattaaaagtacaaaaactagctgggtgtggtggcccagctactcgggaggctgaggcagacaattgcttgaacctgggaggcagaagttgcagggagccaagactgtgccgttgcactccagcctgggtgacagagtgagactttgtcttgaaagaaagaaagaaagaaaaagaaagaaagaaagaaggaaggaaggcaggaaggaggaaaattttatatagtgtcataccaataaaaaggaaataatgaaactaagaatacagatcactgttggaagagaaagcagtggtgatggtgtgggcactgcaggaagtggtggggccgtggcacactagaagttaggtcatgctgaataggaagcatttgactttctctggtgcttttagctctggggctggttgaaggcctctctctggtgtggctgtccagggtttgtcccaactaagccagcttgagaaggggtcatgctttcagtttcttctttcacacgggaaaaaaaagaccaaacaggaaggtgcccagggcgtggatctgctggtgccccaggagagccagctggctgggcagcccttcttccccaaaggcagctggtattgcgtagggacagccaggtcaccgagtggccgtcacaacaaaccccagcacagtccagcccggccacagccacctcccctgttgtgttccctgctgctgcccacatcctttacccaccgtctctcggcccactagaggtatcagaaattccaaattttcaaagcagttttaatattttcagtgtatatgttgggattttataatggttcatggccagaaaaggttcagcacctcccacacacagacattgatccatttcctgttcttggcatctctgtactttgttggtccaactcagacagcaactttaaggtgttcagtgcagctggccaggcacggtggctcacgcttgcaatcccagcactttgggaggccgaggtggatggttcgcctgaggtcaggagttcaagaccagcctggccaatatggtgacaccccgtctctactaaaaagtacaaaaattagccaggtgtggtggcgcatgccggtaatcttagctacccaggaggctgaggcaggagaattgctggaacccgggaggcaaaggctgcagtgagctgagatagcaccactgtactccagcctgggcaacagagcgagactctgtcttttttttattttcttttgagatggagtctcgccctgtcacccaggctggagggcagtggcgcgatctcggctcactgcaagctctgcctcctgggttcacgccattctcctgcctcagcctcctgagtagctgggactacaggcgcccgccaccacgtccggctaattttttgtatttttagtagagatggggtttcaccatgttagccaggatggtcttgatctcctgacctcgtgatctgcccgcctcagcctcccaaagtgctgggattacaggcatgagtcaccgcgcccggtcgagactcggtcttgaaaaataaaaaagaaaaagaaaaagatgtttagtgcagccatatcatagcaggactcaacatccttgccaatactatgtgttagatataagagaataagtacattctatgtctttgtactttaaccaagatatttgtactagacatgctcacaggcacatagtacattctacgtccttgtactttaaccaagatatctgtgctggatgtgctcacaggcatgtcccagctcgcagcccatgccctttccttatttggaaatattattgcttttctaagtccttttgtaagcaacttcctcttttcctttgctctctattgcctttacctatttaggaaagttttaaattattagccagtcaggtttaatttagattgtgaggtcttgcttcagccaatggagacaggacacagtagcaaggacaaactgcataagggataaaaattgcttccctcctttgttcaggtgtgctctcgccattattccatctgcaaggagcaccctttatgcagaaagtaaaattgccttgctgagaaaacttattatctgaatgctgatttttacttgcagtaccgaggaacaagcattctatttctgaataaacattttacttataacactatggctgatcagaggcggctgagaggagcaatggataagagatacaaattcattcttgttgtttttggggaagtctttgtattcaacctggaatccctggactctggaaagatagtccacttgctcagaggatctcatgagaggtccatggggtacgtggcctgaagagatgttattctttttttttttttttttttgagacggagtctgttgccaggctggagtgcagtggcacgatcttggctcactgcaacctctgactacctggttcaagcgattctcctgcctcagcctcccaagcaactgggattacaggcacgcatggctgattttttgtattatcagtagagaaggggttttgccatgttggccaggctggtcttgaactcctgacctcaggcaatccgcccacctcagcctcccaaagtgctgggattacaagtgtgagccaccgtgcccgacctcaaatgataattctagggtttccccacagtggctgcactatttttttttgtgggtgccagacagaagtgttcttgtttgagggacaggaggaccccagctgtggaaagtataggacttccccaatgtacctttcatggtggtcttcccatgggcatctggtggacctcttgtcatgattcccattttgtagtggagaaactggaggcttccagagagtgtcccaactggggactcacaacatgtggtcctgcctgggggcagagccaggggttgtttgtcctgggaaggacttcagcccatgtctggtagggggacggggaggtgaagcggacacagggctccacaactcccctctctcaccctccccaagcacccatctccccatgtacccagccacctggagcagggatccctctctagggctggcaccttctcttatcccaattctttcccatttcattcattccagaagacatttcctttgttgagatttcagctgggattttcctgggtgcgagttgggggctctagctgtgatttcactcagaagtcttccagctctctttaaggcttactgggaagatggagtgaatgatagtgaaaatcatcacacataacaggcactcaatgattctttggagagtgatctaggggaggtggctgattgtggtgcaaaggagtggaccatcagggcagagctggggttggaggatgaggagctggtgtgggcacagctgaggaaaggaatgtggatggagggaacagaatgtgcaaaggctctgagacgggaagttgcttggcctgtggaaggagtggcctggagcagcctgaggtgagcaagtgaggaggagggtggtgggagacagggctagaggcatcaacaggggtaagccatgtaggttgttgtggtccatgacaaaaagtctaaatttagctggatgaggtgactcatgcctagaatcccagcactttggaaagctgaggtgggaggattgtctgagaccaggagttcaagaccagcctggacaacatagccagaccccatctctaccaagaatttaaaaattagctgggcatggtggtgcatgcctgtagtcccagctactggggaagctgaggtaggaggatctctggagctcaagagtttgtggctgcagtgagctatgattgcaccactgcacttctgcctgggtgacacagcaagaccctgcctctaaaagaaaaaccgtgataaaaggccgggcacggtggctcacgcctgtaatcccagcactttgggaggccgaggcgggcggaacacgaggtcaggagatcgagaccatcctggctaacacggtgaaaccccatctctaccaaaaatacaaaaaaaaaaaaaaattacctgggcgtggtggcaggcgcctgtaatcccagctactcaggaggctgaggcaggagaatagtgtgaacccggggagcggagtttgcagtgagccgagatcgcgccactgcactccagtctggcgacagaatgagactttgtctcaaaaaaaaaaaaaaaaaaaaaagaaacaaaacaaaacacagaaaaaaaaaaaaaagaaaaaccgtgaaaacaaaagagtctaaatttcatttagagcaaagtggggagccatgggagaattttgagcagggaaggttcatgatctgatttaatttgaggaagatccctctggctgtgtgtgcagaatggacttcttgcagggagaaaggatggaactcaggggaccagtgggaacgggccactgcagtgctggcctgctgtgggttgggatgatggggatggagaatgatgaatggattctgaagatgtttaggatggacaactagcaggacccggcaacagattggatgtggctgaaagggggaggaagagggtgaggtgaatctgagagtctaggagatgcccccagggggatgttcaggagctggctggacctggcagtgctggacactgagacatgggaattgcctttgagataggatttctgaaaccacgggaggggtgagatcctcaggatgtgggcacagaggaaaggggggacaacgtggctcttagaagccccaacatttacaaaccgggtgaagaaagacgggctcaaagcagactgagaatgggatttttttttttttttttgagacagagtctcactctgtcacccaggctggagtgcaatgatgcgacctcagctcactgcaacctctgcctcccacgctcaagcgattctcctgcctcagcctcccgagtagctgggactacaggcgcccgccaccatgcctggttaatttttgtatttttagtagagatggggttttgccgtgttggccaggctggtctcgaactcctgacctcaagtgatccacccgccttggccttccaaagtgctgggattacagatgtgagccactgtgctcagccagaggaggggactttttgaggctgaagtggaggatgggcaggagtgagttcctgaagggctttggatgccaggctgaggggagtagggagccatgcagggtgttagagcataggagtcacaggctgttagaaaggggattgtggtggctggaatgggactgaactgcagccaggtggctcctgggggtggatgtgatgattcatgtgacccctgttggctgaatatgttgactccctctcagcacttttgggcctgccaagatggtaacacccaccccacacccactgaccgggctgcagacgaaaaggtcacactggtgtggacccagagatcatctttttatagtcaccccgaggtacaaacagggaaactgaggaccaggccacatagccaattggtgaggaggcagacatagaatccagatgttcatcgtgtatgtttgtgtctgtgtgtgtgtgcgcgtgcacaagtacatgcatgcatttaaaaagaaagtctcagcccggcgtggtggctcaagcctgtaatcccagcactttgggaggccgaggcgagcagatcacgaagtcagcagatcgagaccatcctggttaacacggtgaaaccccgtctctactaaaaatacaaaaaaaattagctgggcgtggtggtgggcgcctatagtcccagctactcaggaggctgaggcaggagaatggcatgaacccgggaggaggagcttgcagtgagctgagatcgcgccactgtactccagcctgggcgacagagcaagcctccatctcaaaaaaaaaaaaaaaacaaaaactaaaaaaagaaagtctctttccctttttttgctgtttttttttttgagacggagttttgctcttgtcaccatttattggtgacaaacactaagttttacttgcattccatgaggagaaaaactccagcgtaaacaatgaatggaggcaatacttcactcacaggggtaccaggctttccatacggaccacacacagagcctcagtgcacacacttcttttttcatttttatttttttgagatggaatctcgctctgtcacccaggctggagtgcagtggcacgatctcggctcactgcaacctccgcctcccaagttcaagcgattttcctgcctcagcctcccgagtagcgggtactacaggcgaatgctgccatgccctgctaatattttgttttgtttttttgttttttttttttgagacagagtctcgctctgtcgccaggctggagtgcagtggcacgatctcggctcactgcaacctccgcctcctgggttcgagcaattctcctgcctcagcctcctgagtagctgggattacaggtgcccgccaccacacctgactaattttttgtatttttagtagagacggggtttcaccatgttaaccagcatggtttcgatttcctgacctcatgatctgcctgccttggcctcccaaagtgctgggattacaagtgtgagccaccacgtccagctgtgattggcttatttcactgaacaggatgccctcaaggttcaaccctggtgtagcatgtgtcagaatgtccttgcttttgaaggccgaatagtattccattatgtggatggaccctattttgtttatacattcatttgttggtgggtacttgggttacttccaccttttttttttttttttttgagacggagtctcgctctgtcacccaggctggagtgcagtggttcgatctcagctcactgcaacctccgcctcccaggttcaagcgattcctgggcctcagcctccccattagctgtgattacaggtacctgccaccacacctggctaattttttgtatttttagtagagacggggtttcgccatgttggccaggctggcctcgaactcttgacctcaggtgagctgccccctcagcctcccaaagtgctgggagtacaggcatgagccaccccgcccagcctacttccacgttttagtgattatgacttgtgctgctctgaacatgagtgtgcaaatatctcttcgagacactgctttcaattctttgggggtatatccccagaagtagaatggatggattatagggtaattctatgtttaattttaattttttttaagatacaggatctccctatgtcacccaggctggggtgcagtcgcacgatcatagctcactgcagcctcgaacaactgggctcaagcaatcttcccatctcagcctctagagtagctgggatcacagacatgcaccaccatgctcagcttgtttaatcttaaaaggaaccaccagtggccgggcgtggtggctcacgcctgtaatcctagcactttgggaggtggaggtgggtggatggcctgaggtgaggagttcgagaccagcctggccagcatggtgaaactctgtctctgctaaaaatacaaaaattagcccagcatggtggcgggtgcctataatccaagctactcggtaggctgaggcatgagaattgcttgaacccaggaggcggaggttgcagtgagctgagactgtgccactgcactccagcctgggcaacaaaagcgaaactttgtctcagaaaaaaaaaaaaaaaaaaaggaaacaccatatggttttccccagtgcacaacagttccaatttgttcacatcctcaaccacacttattttctgtttttttgtttcagttgcaaccatcttaagactggtcatgtagtctgtattttaagtcataatatccatcccaattgggatctccaaatctgatgatgacccacccagctgttttcccaggaagtgttaactaataaaaatttcacttctgcagctgggcgaggtggctcacacctgtaaatctcagcacttgggaggcagaggtgggaggattgcttgagcctaggaatttgagatcagcctgggtaacgtcatgagactctgtctctacagaaaatagaaaaaattagctgggcatgatggtgtgcacctatagtcccagctactctggaggctgaggtgggaggattgcttcagcctgggaggttgaggctgcattgagccgtgatagtactctttagggtcactatttagcctgcgtgatagagtgagaccctgtctcaaaaagaaatttcacttctttatttttattatttttattttgtttcgagacggagtctcactctatcgcccaggctggagtgcagtggcacgatctcagctcacttcaacctccgcctcccaggttccagctattctcctgcctcagcctcccgagtagctgggattataggcgcacgccaccacgcccggctgatttttgtatttttagtagagatggggtttcaccatgttgtccaggctggtcttgaactcctgaactcaagtgatctgcccacctcggcctcccgaaatgttgggattacaggtgtgagccactgcacccggccaacaaatttcacttctgcatggaaaatgtggtttggcgttggctggcagaagacctaagtgaggcgtggtgtggtggctcatgcctgtaatcccagcactttgggaggctgaggtgggcggatcacttgaggtcaggagttcaagaccagcctggccaacatggtgaaaccccgtctctattaaaatacacaaaaaataattagctggatatggtggcaggtgcctgtaaccccagctacttgggaagctgaggtgggagaatcgcttgaacccaggaggcagaggctgcagtgagctgagatcgcaccaatgcacttcagcctgggcaacaagagcaagactctgtctccaaacaaaaaacaaaaaaactcacaacaagatcccatgagaactcactcactcactatctggaagacagcgccaaggggatggtgttaaccattcatgagaaaccagccccgtgatccaatcaccttccactagaccccatctccaacactggggattccagttcaacatgaggtttgggtggggacacagatccaaaccatatcagattctctgagatgaggctggtactgcccggagcatggtggtgcacggcagatgacaagcccttcctgcctgctcactgttttattaacattatggttacctgactgctttgttttggttccttaggagctggccctaaagcaaggacctgagtgcaagtaatttttttgggaagtaataacagaaaataccagcaaggaagaagacagtgaacccaaaagaattgaaaacaggtactcagataaatacatgtacacacatgttcagagtagcatatttcataatagccaaaatgtagaaacagcccaaatgtctgtccacagatgaatgaataaagaaaatgtggggccaggtgtggtggcatgcacctgtagtcccagctacccaggaggctgagacaggaggatcacatgaggctgggaggtcaaggctggagcgagtcgtgatcatgccactgcactccagcctgagtgacagaaccagaccctgtctcaaaagaaaaaaaaaaaaaaggaaatgtggaatatccatacaatggaatattactcagcagtacaaggaattaagctctgattgatgctacaatgtggatgaacctcaaaaacaggatgccgagtgaaggaagccagacacaaaaggctgcatagcatttaatagatttatatgaaatatccagaatacttaaatccatagagacagaaagcagattagtggtgccaggggctccagggagggagaatgggaagtggctactaacagggatggggttttgttttggcataatgaaaatgttctgaaactagctgggtgaggtagctcatgcgtgtaatcccagcactttgggaggccaaggcgggaggatcgcttgagcccaggagttcgagaccagcctgggcaacatggcaaaatcctgtctctacaaaaaaatacaaaaattagctgggcctggtggcatgcacctgtagtcccagctacttgggaaactgaggtgggaggattgcttgagctggggaggttaaagctgcagtgagccgtgatcatgccactgcactccagctgggtgacagaggagaccttctttcaaaaagaaagaaagaaagaaggagagagagagagaaagaaagaaagaaagaaagagagagagaaagaaagaagtcctgaaactagatggaggtggtagttgcattatatgtaaatgtactcaatgccactgaattattccctttaaaataattaattttgtgttatgcgaatctcatctcaactgaaaaagaagaaaaagaaaaagaaagagggggaaaggacgtggccaatagggagtttccactgtgggcagctggagtttaatctcattggggaagcctagagtgagtgtggaacctatatctcagggtcattgcacccaaggggtgagggagctggggtatttatccaccaatgagcctcagtcattggttgagagctgctcctttgggaggggtgtcttggtttcccagcctgaccggctatgcctgggcagagaatgccctatggtagagaagtcaagagggtggccttgtaaaagtcaaggctgagagcatacgagcagggccccgagtgcatccatctgtccagctggttggagatcatggctgggggatgaagaggtatccttggtgtctggaactcacgtgtgctgggaaccttctgtgcactaggcacaccatgcattaccccatgggtcatcgtcttgtgcatggcaccgaccccctgaccctgtgtgtccccaggatgctgcccatcacagaccgcctgctgcacctcctggggctggagaagacggcgttccgcatatacgcggtgtccacccttctcctcttcctgctcttcttcctgttccgcctgctgctgcggttcctgaggctctgcaggagcttctacatcacctgccgccggctgcgctgcttcccccagcctccccggcgcaactggctgctgggccacctgggcatggtaagtgtggccaggcaggactgggctgggctgggctgggcatgtgcagggtaataggtagggatggtgggcctgctggcttcccacagcctcccaagaatctggttggggctagcagcagatttatatgatggggtatgaggctgaggctcagagagggcaagcagtttacccaaggtcacacaggtgggaggaggcagaactaactttaaagatgaattattttgggaggctgaggtgagaggattgcttgaggccaggagtttgagaccagcttgggaaacatagtgagaccccctctctacaaaaaattcaaaaattatatgggtgtggtggtgcacacttgtagtctcagccacttgggaggctgaggtaggaggattacttgagcttaggagttcgagaccagcctgggaaacacagtgagaccccatctctataagaaaaattacaaaaattagctgagtgcagtggcacacacctgtaatcccagctacttgggaggctgaggcgcgaggattgtttgagcctgggagtttgaggctgcagtgagctatgattgtgccaccgcattctagcctgggtgacctagggagaccctgtctctctaaggaaaaaaaaaagaactctctctataattttatagctatcactgtacaataggtacctttacctttggagtttggaatcccagggcagggttggaggaggagaggggaacacatcctattcccaatgtggttccactcttctcccttgaatgctgtggtcctaggtgaggactcttacccttttattgcattgaatttttttctttttgagacagggtctcgctatgttgcctaggctgatcttgaactcctaagctcaagcaatcctttggcctcagcctgctgagtcctttttaattttgcagatatgtgccaagtatttttccaggcaaatattaactcattcagttctcttgacaattctaggaagtaggtcccatgactagccccattttgcgtggaagattactgaggcacagagaggttaagtagctgaccttaggtcacacagcttgtaagtggcagagctggggttcaaacccagcctgtcaagctctagcctccttgatctcagttctaccctctgatgcctctagtttctgtagttagtttctagatgagataggctagacttttccttttttttttttttttcgagacagtctttctctgctacctaggctagagtgcagtggtacaatcatggctcactgcagcctctacctcctgggctcaagggatcctcctgcctcagcctcccaagtagctgcgactgcaagcctgcaagtgcatgcccccacgcctggctaatttttgtacttttagtagggacagggtttcaccgtgttggccagactgatctcaaacccctgacctcaagtgaaccaccgtgctcagcctccctgtttttagttctactctctgatgcctctactttctggatgagataggctggactttcccttttggacttttctccttcatttcttccatcccttacccctgctcaggccttaccctctactgctggtccatggtccagccccctccttgagttcctacctccagtttcatcccttcggtccgtctcccatcctggccccagagggattcttggattcaaccacatccctgcccctgcttacacaccctccatggctccctattgccattcagaaaaaggctggtgttcaaggcccttttggctccaacctccatcctcctcacttgttccaccatccctccctagctccatagaatcacttcccactcctgtaacaaggctcccacctccaaggcctttcccaaaactgtactctctgtccaggtatccttctctgctagatcaacttctgctcatttttcatgccccatctccagtgcccttactctagaaagccctctctgggtttgatggttgtcctagagggagtggccaggctctagtgcctggaggagttggccagggtcagctctaaagcccagccttgacgttgtcctgcccagctcctgggcccacgggggctgggtgaggctgcaattgagccctgggtgtggacatgatcaaggctgagcctgacggggaaggagacacaggagctggaaaggagtcatttgttggttgaatcatttggcaattgctgagccttatcactggctaggcactgggttaggctcctttgtagctgagctcttctctaattctcatagcctgtgaagtggggatggatctgtcctatttcatggattcacacttttatggatttgagcacagagaggttaagtggcttgctcaaagtcacacagccgctgagggtgggtttgaacttggatttttctgacgttgagcctgaagctttcctgcctcatacagcaggtgaggaagtgcagttttgtagctaggtggcctgggttcaggtactagctttgcagatgatgccaaagcttgcccatattcctctcaacccatttttggatgcagtggcctgacgtccagctgccagctcctgcattctaggggctgtctctggtggctggagcccactctgcaagtgaaataaaggctgggcacagtggctcacacctgcaatcccagcacgttgggaggccaaggcaggagaattgcttgagcccgggagtttgagaccagcttgggcaacatagcaagacccagtttttacaaaaaaattaaaaattagccaggcttggtggtgcatacctagagtcccagtgcctgtcctgccactgtcgcttctgtgagcttgggaattaacgcccccaggagtgaccctcaaccaatgactgatgggcattggtgtataaatacctcagctcccttgccctcaggtggagtgactctgaggtgcaatgcgctactctgccctccaaagctccccagtgggaccgagccctggttgcccttggtggtaatttccttgacaactcatcctttactggtggtcttcttcccctatctcatgacccatgtttttggggatcatgccccaaataaactacctgccctagaacccttgtctcaggacttccttctgggggagcctcaaccagaacagtcacctacttaacttgcaacttcagaaaaaccattcgaccttgctgaacaaaataaaatgaggaaaataatagcaacggtctcatagggttcttgtactgatcaaatatgccagtacatgaaaagtctccaccacagtgaccaacacagtgcaggcacctgtatgtggtaaagatagcaacagtagtaatatcttattactcacatagcaagtacttgataaatgccaaccatgatcattattgtgtttatcattactatttttatttttattttttaagagacagggtcttgctctgtcacccaggttggagtgcagtggggtgatcatagctcactgcagccttgacatcccaagctcaggtggtcctcctgcctcagcctcatgagtagctgtgactacaggcatgtcccaccaagcctggctaattttatcttcttattttattttattttttttttttgaggtggagttttgctcttgtcgtccaggctggagtgcaatggcatgatctcggctcactgcaacctctgcctcctgggttcaagcgattctcctgtctcagtctcctgagtagctgggattacaggcgcccaccaccaagcccagctaatttttgtatttttagtagagatggcctttcaccatgttgtccagcctggtctcgaactcctgacctcaggtgatctgcttgccttggcctcctgaagtgctgggattacagatgtgagccactacacttggctactatttttagctattgaacatcagccatgggtcaggcccatgctggggctcttgctttgttatttcatgaatcctttctactgccctcagagggagagttgattctcctccattttttcagatgaggaaatggaggcccagggaggtgcagccaactgcctgaaatcataatgtagcactattgggcttgttttgagactacaggaggtggcaggaggaaggcagtgggggaagctggggctgggtacctcctcattgctcctcccttacctcttgcagtaccttccaaatgaggcgggccttcaagatgagaagaaggtactggacaacatgcaccatgtactcttggtatggatgggacctgtcctgccgctgttggttctggtgcaccctgattacatcaaaccccttttgggagcctcaggtacgtgggctgggcctccgatctatggttgagtcctcaactcccagagcctatctgagattctaggcaggtgggatatccagaggaagggtcatttgaatagggctttgaaggatgaataagagtttggcaaagcaagcatggcaatccagattgtgagaacagtatgggcaaagatgtggcaatgactaagagttccagaaacttcgagggaatgtccatccatctggcagtcagagccaggcacgtttggataggcagttgttccttatggttttgttaagtaagtgttactcaatccctggccgtggcacgcccatcatttggttctgacattcccattatggccaggactcttggtgactcagcctgcagcctgctgtcatcacttgggctgactctgactggcagggagggagatgtggaagaattccttcttcctcgtgcagtccacacctatcccaagatgtgagacttccaagtctgcttggcaagctcttgctcagccttcaacacccagctccaatggccgcctcctccaggaatctttccctggcttcccagacagacctattctcagtcctaaccctttggacctgggtatgtctgtgtccagctctatcttcctcatgagcgggactctggatcctcagtgtggccttgtgtacctggtgtattagtcagttctcacgctgctatgaaggactaccctagactgggtaatttataaaggaaagaggtttaattgactcacagttccgcagggctggggaggcctcagaaaacttacaatcatggcggaaggggaagcaaacacgtccttcttcacatggcagcaggaaggagaagtgccaagtaaaagggggaaattcgttaaatctcgtgagaactcattcactatcatgggaacagcaacatgggggtaaccgcccccatgattcaattaccccccaccggatccctcgcatgacacatagggattatcggaattataattcaaaatgaaatttagatgggacacagccaaaccatattacctgggcacctccagaggtatcgggacatctgagagaactcactctcaaatgaaccaatgagctccagtaggtcaggcatggtggttcacatctgtaatcccaacactttgggaagctgaggcaggagggttgcttgaggccaggagtttgagactagcctgggcaacacagcaagaccctgtctctcgaaaaaaataaataattacccagtggcagtgatgtgcacctgtagtctcggctacttgggtggctgagatgggaggatcacttgagctcaggagtttaagaccagcctgggtaatctagcaagaccccatctgtacaaaagcatttaaaaatattagctgggtgttgtggtgcatgcctgcagtcccagctactcaggaggctgaggtgagaggattgcttgagcccagcagatggaggctgcagtgagctatgattgcaccactgctgtactccagcctgggtgacagagcaaggcttagtctcttaaaaaaaaaaaaaaagtgggagattccaggaattttaggatctctgtcccagctttgcctctacaaacacgcatctggggaccatctccagggctgccacccaggagctgtgaaagaagctgccatcttccccttccacagctattccctctcaatgccttgttgtctcccgttattacatttgtgaagggatgacgatccctgttgaactaaggggaaaacctagaccttgggagggagaattgactcttctgagggatgaataccaacttgtgggaagagccctgggccaggactgaggtgggttggcttcaaattctggccttggcacatgcttgctgtgagaccccagccatttatctagcctctctggatctcaggttttgatctgtaaaatgggtgcagttgtgaagcctgaataatataatgtggataagaggccacgtgcagtgactcatgcctgcagtctcagcactttgggaggccacggcaggaggatcacttgagcccaggagttcaagaccagcctgggcaacagagcaagactctatctttacaaaaaatttaaaaaattagccaggtgtggtggtgcgtgcctatagtcccagctacttaggaggctgaggtaggaggattgcttgagtccaagaggttgaggctgcagagagctatgattgtgccattgcatccagcatgggcaacagagtgagattctgtctctaaaaaaattaaaaaaaaaataatatggataggcattagtaagggtttctcttctgcctttttaatatatgtttttctttctcttttcctcctttcctttcttcttcctccctcttctcctcctccttctacttctctctctactcctctttccccctcctcccttctcttcttctttctctcctcctccttctacttctttcttcttctccttctcctccttctccttcttctcctccccatccccctcctcctcctccaccttcttctttttcttcctcttctttttagacagagtctcactctgtcacccaggctggagtgcagtggcatgatctcagctcactgcaacctctgcctcccgagttcaagtgattctcctgtctcagcctcccgagtagctgagactacaagtgtgcaccaccacacctggctaatttttgtatttttttttttcagtagagacggggctgcaccatattggccaggctggtcttgaactcctgaccttaagtgattctcctgccttggcctctcaaagtgctgggattacaggcgtgagctacagcgcctggtctctcttttttctccttcctcctcccttctcctccccctcagagcatcagtttcctgagcaccatcctgcctggttctgagactccaaacagaccgaggagtagtgccccagcaggggctgtcatgtagtagatgcttaagcctcttgccctcccctcatccagtggagggaggggatattctgtgtaccccatcagagaagccagatagggaactccaggatggaaaaaagggtggtgctgtgagtcagcctggagtgaggcctcttggccccagggtgcccccacctggaattacacagatcaggctccagtcacagacaccaccctggatcaggacctcctggggccacacctgggagtggcttgctgttctgagcttggagctgcacagcccttgagcctggaggagggcccagctcctgttggagcttcagtttccccatcatcttatgggcctttggactaggaaattttaatgagagaaagtagataaacatgctttatagagaacatgatgatatatagacatataattgtagcttgcttttatatcatctttttaaaatggaggtgaaattcatgtaacatataattaaccatttacaagtgaacaatcagtggtatttagtgtattcaccatgttgggcaaccaccagcattttccagtttcaaaatttttagtcacctcataaaaaaactctgtacccattgagtaatcacttcccatttccctcctcctcccatccgctggtaacctcgaatctgctttctgtctctatgtatttgcctattctgggtacatcatagaaagagaaccacataaaatgtgatctttttgtgtctgttttcttttactcagcataatgtttttgaagttcattcacgttgtagtaggaatcagtttcattcttttttttttttttttttttttgagacagggtcttaccctgtcacccagaggctggagtgcagtggtgtagccataactcattacagccttgaaatcctgggctcgagtgattctcctcctgcctcagcctcccgagtagctggaactgcaggcacgcaccaccatgcccagctaatttttatttttatttttgtagagatggggtcttgctatgttgtccaggttggtcattagggctgaattcatttcactgtatggatttttttttgtttacccattcaccttttggatgttgtgaatcatgctactatgaacatatgtgttcaagttttggggtggacatatgttttcatttctctcttgggtagatacctaggagtagaattgccaagtcatatggaattctgtacttaactttttaaggagccaccttgctgttttccacagagggtgtgcattaattttctactaacaggaaacacaactatttatctcacaagttcttgatgccaataaataatcattttaaccatagtaataaaaatagccaacagttggtcaattattcatttacctacgcacgtatttaatgagcatctaccatgtgccaggaacacaagagcttgttgagtcttatagggatgccatgaggcaagattgttctattttctcctttggcagtggtaacatgtccaggcttacatatctagttagtggcagggctgggatttgaactcagacctggctggcccagaacccaagctctcaaacatagtgatatgcagctttctgagcatgagtttctccatgctggcaccatgtgggggtatttcgtacaccgtctcatccatggtaggcattaccatctctccctctttttttttttctttttaaaaaacatttttgtagagacagagtcttgctgtgttgcccaggctggtcttgaacttctgggctcaagtgatcctcctgcctctgcctcccaaagtgctaggactgcaggtgtgaatcattgcacctggcctaccatctcctttttgctggaggggaaaactggtgaggagcgtggacacagactttcctggcattgtggtcagagttggagtggaaaaggaacctgaggatgagagaacaatggttcagctgagaagggggtttggagaaggcttcctggagtaggtgtcagtgaagctgggccccgaaggatgcctaggagcttgccagagaaggagtcccagatggaaggtcctgccagtgccttgatgcagatgtgtgaaaattccaggggaattcaggtgatttagggtggctggagtgaaggtgatatgttggggggaataggaaatgagactgacagttaagcaggaactggacagcaaagtgaatgaacttgtactttatcctgggagtgatagggagccacgggaagtatttgaacaagacagctattgaccagatcctggtgtcagaaagatccctgtggagcctatcttggagtccagagtgcagagaggagaggagtgactagactcctgctttcctcttcaatgctgcctcctccaggaagcctgccctgacttccaacagccctttttctgagccttccttagcacctagcacactttctaccttcttggtaattgcatggtgtgtctctgcttccctttcctgccccactcaggagctcctccagggagggcatagagctgagccatctgtgggtccccagcatcacccagcttgggttgggcacagaaaggcagcataagaggtgtgatgaatggggggatgagtgggcggatgattgtgtaggcaattggccaattcctagggattgtgtcggtgtaggtggctgagtcgcattcaggtaaaagtgatatcactcgaatttcagatacttccttcctgggcctctgcccattcagccccaaatctgttcagtatatagaaggaggatccatccattcatccatccactcattcattcattcatccatccaccttccacctatccactcattcatccatccatccactcatccatccatccaccatccacccatccatccattcatccatccatccatccacccacccaccatctatccatctgctattcatccatccacttatttatccatccatgtactcatctgtccctctactcatccatccacccatttattctttcattcatccatccttggattgacttatttattcatttaataaaaatttatctagcacaacatatcagtaatcaacacgaaccctcctgttaaggggcttgtaactaagtggatacaatccagagtgactgctgggtcaggggtggggagaagcattcaagttctcatacaggatgagggaagagtgtttggggcagagagaacagctggtggaaagtctcagagaagagagagcacgtggtctttttaaggagctgagaaaagttctgtggtgtggccgggcatggtggcttatgcctgtagtcccagcactttgggaggctgaacttggaggatcacttgagctcaggagttcaagaccagcctgggcaatatggcgataccctgtccatacacaaaattaaaaaattagccaggcatggtggcgtatgcctgtagtcccagctactcgggaggctgaggtgggaggatcgcttgaatccaggaattggaggcagcagtgagctatgatctcaccacacaccccagcctgggtgacagagtgagaccccatctcaaaaaaacaaaaaacaaaaagttatgtggtgttagttctgtgacgtcgaatagggggtggaagacagaggtgtcttgagagagatttggacaaaggcaaatgattcagggctttgaaaatgggctggtatgtgagggtgatgggtgtgtgagcaggaaggggcgtggtcagatctgatagtcagatgagattctcctggggccattcatgagggacacactggagagggtgaggctggaggctgggagcacaggaggtgtgattcagatggcctgagctggcagaaaataagggggtggattaggggaagactcaggtgaagaagtccattctggatagacagctcaacctggtcaaaggttcagaggtgatccacagcaggcgatgagaatagggttatctggtgtatgttgaaggatgaggtggtgggagaggcatacaggggccagatggaattgggtttcaatgccaggctgagcctgaactttttacaagtgcaatggggagccatgggaggtgtctgagcaggggaggctcatgttcagatcagtgttttataaggattttttctcgggtaggtgtggaggacggactgggtgaatacagtgggaggttggagcccagtgaggaggactaaggaagtcataagcaaaggtcaagggttggaactctgttttgaggccaggcacgatggctcgtgcttgtaatcccagcactttgggaggctgaggtgggtggatcacttgaggttaggagttcgagaccagcctggccaacatggtgaaactctgtctctgctaaaaatacaaacaaattagccgggcatggtggcggacacctgtaatcccagctactcaggaggcagaggcaggaaaactgcttgaacctgggaggcggaggttgcagtgagtggagatcgcaccactgcactccagcctggatgacagagcaagactccgtaaaaaaaaacaaaaaaccaaaaaactctgttttgagtcaccattttccctttgccctccacagctgccatcgcccccaaggatgacctcttctatggcttcctaaaaccttggctaggtgagtgcccagtgggtaggctggggctggggctttagagaagagagggaagagcatggggttccttggaaggtttcagagtaacaggagaggtccctaacctcagtcttctgggcccaggggatgggctgctgctcagcaaaggtgacaagtggagccggcaccgtcgcctgctgacacccgccttccactttgacatcctgaagccttacatgaagatcttcaaccagagcgctgacattatgcatgtgagtcctaaggctttgagggaagagggtgtcttgggagtgaggctggtccaggctccaactcatgcatgggcaagccatgtgatgtcaggagccctcactgactttatctataaaatgagcttgtagtgaaaacgcagtcgggtccttgttaggctgactccctctctgtggtttccatgcacagtcaccatgtatctctcttccaggctaaatggcggcatctggcagagggctcagcggtctcccttgatatgtttgagcatatcagcctcatgaccctggacagtcttcagaaatgtgtcttcagctacaacagcaactgccaagagtgagtgtgacccttcttgggaagatggagccagctgctctaggagcaagatggtggcaggagaaagggaactcccaggcattagacaactctggcctatgggagctctgccacggatgggccatgtgcttccgggaaactgaccatctctctgagcttcacttttttttttaatcaaaaaaatgggcatcataattccttccccatagtcattgtgtgagaattaaatgagataatgtgaatcaatggcttggtataaagtaggtgcttagtaaatgttagtattttttcattccactaggaagagtatgtggtctttggacagtgtcctccccactttctgaggctcagtttccttgtttgtaaaaaaaggatgacaatctcttactttctgagagatgctttaaggataaaatgatgcagcactgccctggcacatagttgatgctcagagaatatttgttgagtaaatgaatcaaataaccaatgccttgcttcattaattcattcattcatcaaatattcattgtgcacctactacgtgcctggcaccatgatattgctgctgagaacagggtggtgaacaacagacagtcacagttctgtgaagtttatagtctaagtggggacataaggaataagggagataattaatgcaaaacttgcaacacatagtaggtcctcagtaacaagctaatgacttcgttactctaggcattataggggcacgttccagttggataaggcagagattgtcttagaaattaaataattaattcatccaagaaatatttactgagtgcctagtaagtgccaaccctgaactaggtgctgggaacaccatattcaacaagaaagacaagatgttgcttttctagagcttccattttagtaggaagacaggtaataaccatgaacaagtaaacaaacaagaaaacgacagactgcaataagtgcatgaaaacaagcccacttcaggactgaggacagctcccttcaagcctgcttcacctgttagtttttaaaaaataatggctttgttgagacacaattcacatactataccatttactcatttaaagaatacacctgaactgcttttagtatattcagagttgtgcaaccattactataatcaattttagaatattttcatcaatcctcccccaccccaagaaacttcatacactttagcaacccgtgcacttccctttctccttcaagtctaggcaatcactaatctattttctatctctatagatttgcctgttatggatatttcacacggatggaatcatacagacttttgtgtctggcttgtttcacccagcataatgttttaaaggctcatccatattgtggcatgtatcagttatgtatttcttttcattgatgaataatgttccatttaccacataataccacattttgtttatccagtcacccatcgatggacactgtttccacttttcgacctttatgaataatgctgctattaacattcatgcacaaagttttgtgtgaacatacatttttaattcttttggctatatacctaggagcagaattgctgggtcatacggtaattccattttaaacattttgaggaactgctaaactttatttcagtgggtttcaacatggtatgaagtggttgtaccattttgctctcccaaccagtgatgtatgagagctccagtttttccacatactcactaacacttgcttttttttgttgttgttgttttgtttgctttttagagataggatattgctctgttgctcaggctggagtgcagcccaacacttgttattataagttttgattttagtcaccttagtggggtgaagtagtatctcattgtggttttgatttgcatttctctggtgaccagtgctgttaagtatcttttcacattctcattggaaatttctgtcttctttggagaaatgcctattcatatccattgcccattttaaaataagttttaagaattctttatttattttaggtaccaatcccttatcagatagacaatttgcaaatattttctcccatgctgaggagtgtaaccatttagttttagtgatgctacaatgactatgcctatgttgaaagtctttatccctctttgggcctgttcaaaaatatacccgagactgggtgtggtggctcagacctgtaacccagcactttgggaggccaaggctggaggatcacttgagctcacgagttcaaggctgcagtgagctatgattgtgccactgtactgcagcctaggtgacagagcaagaccctatctaaaaaaataaataaatgaatttaaaaatagagttaatatagggcttctctttgttatctattcaatggggacaggaggcttatcttagccaagccagggctgtgctatgctaggggaaggggctacactcatggatccccttctccttggcaggaagatgagtgattatatctccgctatcattgaactgagcgctctgtctgtccggcgccagtatcgcttgcaccactacctcgacttcatttactaccgctcggcggatgggcggaggttccggcaggcctgtgacatggtgcaccacttcaccactgaagtcatccaggaacggcggcgggcactgcgtcagcagggggccgaggcctggcttaaggccaagcaggggaagaccttggactttattgatgtgctgctcctggccagggtgaggctgggccccctggaattgctggcctcccgagggctggcctcccgaggaattgcatgtaaaatgataagtgttaaaactccattaggcgtggtggctcacacgtgtaatcccagcgctttgggaggccaaggcgggaggatcgcttgagccctggaattggagatcagcctgggcaacacagggagaccctgtctctacaaaaaacaaataagttgggtgtggtgccgcatgcctatggtcccagctacttgggaggctgaagcaggagtctggcttgagcccaggagttggaagctgcagtgagctatgatggtgccactgcactccagcctgggcaacagaagcgagactctgtctcaaaacaaaacaaaacaatacacatgctcaaaacaaaaagaaattcacatgggtctgggatggggtcagaacatgtaagacttactgcgtgagttttcttgggctgctattacaaagtaccacaaactaaatggcctaaacatcagccatttattctctcacagttctggaagctagaagtccaagatcaaggtatctgcagggctggtttcttctaaggcccatgaaggatgaatctgttccaggccttgctccctggcttgcagaaggctgtcttctccctatgtctgcggatcatcttccctctgtgcctgtctctgtcttcgtctctttgtataaggattagggccctgccctaatgagttcattttgtcttgattacttctgcaaagacctctctccaaacacggtcatagcctgaggtactggaagttaggacttatgaattctagcggagggggggtgggcagggaaccattcagctcatcacaattgcaaaaatgaaatacatgaccttgggctgggcgtggtggctcatacctgtaatcccagcactctgggaggccaaggcaggtggatcacttgaggtcaggaattcgagaccagcctgaccaacatggagaaaccccatctctactaaaaatacaaaattagccgggcgtggtggcacacacctgtaatcccagctactcgggaggttgaggcaaaagaatcacttgaacctgggaggcggaggttgcggtgagctgagatcatgccattgcactcaagtgaaactccgtctcaaaaaaaaaaaaaaaaaagaaaaaaaagaaatacatgaccttgaagagatgagacacttctatggtcactcattggtgtgtctgtggaccttttgggttctggattcaaatagtcctggattccagtcctggctctgtcgcttagtggatgtttgaccttagtcattgactcttcttcccaagcctcagtttctccatttataccatggtgatcataaaacctgatcacaaggttgtcaggcatccagtgggatgcttggtgttggaggctgctcaagaaatatgaacttccttcttctcctcactgttgactttctgtccctctttacatctttcttttcttttttcttgttttttaaaaatgtaatttaaagttccaggataagccgggcgcagtggctcacccctgtaatcccagcactttgggaagctgaggtgggaggatcacctgaggtcaggagttcaagacgagcctggccaacatattgaaacaccgtctctactaaaaataaaaaaaaaatattagccgggcgtggtggcatgcatctgtaatcccagctcctctggaggctgaggcaggagaatcgcttgaaccctggaggcagaggttgtagtgagccaagattgcgccactgcactccaatctggcaacaagagagaaactccatctcaaaaaatttttttttaaattaaatggaaagttcaaggatacgtgtgtagggcgtgcaggtttgttacgtaggtaaacatgtgccatggtggtttactgcacctatcaactcatcacctaggtattaagccctgcatgcatttgctatttatcctgatattctccctcctcctgccaccctgataggccccccaagtgtgtgttgtttcccccctgtgtccgtgtgttttcattgttcagctcccacttataagtgggaacatgtggtgtttggttttctgttcctgccttaggttgctaaggatgatggcttccagctccattcaggtccctgcaaaggacataatcttgttcctttttatggctgcataatattgcatggtatatatgtaccacattttctttatccagtctttcattgatgggcatttgggttgattccatgtctttgttattgtcaatagtgctgcaatgaacatatgtgtgcgtgtatctttataatagaataatttatattcctttggttgtatacccggtaatgggattgctgggtcaagtggtatttctggttctaggtctttgaggaattgccacattgtcttccacaatggttgaactaatttacgttcccatcaaccttgtaaaagcgttcctatttctccacagcctcaccagcatctctcactcagggtcttgctctgtcacacaggctggggtgcagtgatgcggtcatggttcactgcagccttgatctcctgggcttaatcctcctgcctcagcttcaccagtagctgggactacaggcatgcatcaccacacctggctgattttttttttgtagaaatggggtcttaccatgttgcccaggctggtcttgaacgcctaggctcaagtgatcctcccaccttagctgcccaaagtgttgggattataggtgtgagccaccatgctgggcactttccatctttattagacaagttgcatacttccatcttcctggactagttccccccacagcttggcttaagagagagaggggagccaggcgtggtagctcatgtctgtaatcccagcactttgggaggatgaggcaggtagatcacttgaggccacgagttcgagaccggcctggccaatatggcaaaattgcatctctactaaaaatacaaaaattagcttggagtggtggcatgtgcctgtaatcccagctattcaggaggctgaggcacgagaatcacttgaacctgacagtcggaggctgcagttagccgagattgtgccaccgcactccagcctgggtgatagagcgagactccatctcagaaaaaaaaaaaaaaaaaaagatgggggcggggagatatctgagttttgaggagcccctaggatgcggagggtgggatgaagtgggctgagcaccctctactgcccattccaggatgaagatggaaaggaactgtcagacgaggatatccgagccgaagcagacaccttcatgtttgagggtgaggatgtggggtgaggctggaggagggcaggaagggacatcattgtctgtagacagcatctctgctttcttcaggcagcctccattcagataccctcatctccctgcaggtcacgacacaacatccagtgggatctcttggatgctgttcaatttggcaaagtatccggaataccaggagaaatgccgagaagagattcaggaagtcatgaaaggccgggagctggaggagctggagtggtgagtgtggggtcaggggaatggagggggcaggttgaggccagagccttgggtgtaagcctctgctctcccacttactgattgtgtgacctcagacaagccactttagcttcctgaattgcaatttcttcagctacaaaatgggggtggttatagtgcctatgcccacctcataatgcagaagttctcaaagtgtcctagtcagcaattattgcaatgatgctgcataatgaacagctcccaaacttagtggtttacagcaagcatttgtttcttgcttttgtatgcacacatttcttgctcttgtctgctcattactctaattgctgttggacttggctgagtggagtggagttgcttcaaaactaagagctgggttcagatctgcttcatatactccctttctgttctctttggaccagaggctaccctgggtcgtattcttctcaaggcagattccagaagcacaaaaagccatgaaatttaaaagctttgcttgggccgggtggggtggctcacgcctgtaatcccagcattttgggaggccgaggtgggtggatcacctgagatcaggagttcgagatcaacctggccaacatggtgaaaccccatctctactaaaaatacaaaaattagccaggtacggtcatgggtgcctgtaatcccccctactcgggaggctgagacaggagaatcacttgaacctgggaggtggagtttgcagtgagctgagattgcaccactgcactccagcctgggctacaagagtgaaactctgtccccacccccccacaaaaaaagataaaataagtaaataaataaaataaaaaaaaaaaacaaaagctgtgcttgcactagaagattgcattggctaaaacaagtcacgtgaccaagcccagcatgaatggggcaggacatatactccactcacctgagcagaaggcactgaagaatcatatgacaaagggtacaggtatataattctaattcagggaggaagtggagaatcagaacacatacccagtctctaccagattcatgctatgtagagctgattctgggtgatgaaaagaaaacacagcattaggctgggcgtggtggctcatgcctgtaattccagcactttgggaggccgaggggggtggattgcttgagctgaggtgtttgagaccagcctgggcaacatgacgaaaccctgtctctacaaaaaaatacaaaaattagctgggtggggtggcgcatgcctatagtcccagctacttgggaggctgaggtgggaggactgcttgaacccaggaggtggaggctgtggtgagtcaagattacgccactgcactccagcctgggtgacagagtgagaccctgtctcaaaaaaaaaaaaaaaaaaaaaaagaaaagaaaagaaaagaaaagaagaaaaacacagccgcaacattaaatagcatcaactcacacagtgaggaggttcctttcggttctatttcaaccttttgccttatggcctcagggggacatgctcagtggggtgctactgtgtcctgaacactttgctaatcttccttttaaacaagtggagaagatgtctcaggttgagagagttgggtgggagttggtgtgtagacacaatttaataacacactactgctttcacagtggtgtttgtatggatgaatacctttatgccagggatgctgtttgccctttatagcaacatgaagtttatttttttttaagacacaggctggagtgcagtggcataatcatagctcactgcagcctcaaactcctgggctcaggcaatcttcctgcctcagcctcctgagtaggtgggactataggagtgtgccaccacaactggctaatttttaacatttttttaagagatggggacttgctgtgttgcccaggctgctctcaaatccctgagtgcaagcagtcctcttactttggcctcccaaagtgctgggattataggtgtgagccactgtgcccagccataaagtttctttgaaagagaacctgggccaggtgcagtggctcatgcctgtaatcccagcactttgggaggctaaggcgggtggatcacttgaggccagaaattcaagaccaacctgggcaacatggtgaaaccctgtctctactaaaaatacaaaaattagctgggcgtattggtgtgtgcctgtaatcccagctgcttgagaagctgaggcgtgagaattgcttgaacctgggaagcagaggttgcagtgagctgagattgtgccactgcactcctgcctggatgaaacagcaagacgccatcaaaaaagaaagagaacctgctaatttaaagaaactaatctaatctagaacatgaaccaagagttatcattagcccaattttgggccctaaagtccaagggaaaaaatattaagtaaatgatattataaggagataatgcacttttcttttctttcttttttctttttttctttctttctttttttgagataggctctcacactgtggcccaggctggagtacagtggcatgatcatagctcactacagcctcctgagtagctgggaccacaggtgtgtgccatcatgcccagctaattttttaacttttggtagagatggggtctctctttgttgcccaggctggtcacgaactcctgggctcaagttatccacttgcttcggcctcccaaagtgctgggattacaggtatgagccaccatgcctggcctgcaccagttttttttttttttttttttttaagacaagagtctcactctgtcacccaggctagagtgtagtggtgcaatctcatctcactgcaacctccgccttccgggttcaagcaattctcttgcctcggcctcccaagtagctgagactacaggtgcacgccaccacacccagctaatttttgtgttttttagtaaagatggggttttgctatgttggccagactgatcttgaactcctgacctcagacgatcgcccatctcagcctctgcaagtgctgggattacaggcgagagccaccacacctgtcctgcagcagttttttaagtacagaaatggaccatataaactggcatattgctgttgccgtgagtccccttggctgtcctggcacctcgcctaggtgcccctggacctccacataattcatcaattaaaggcttaatgctgggcccagcagagggcccagtgctagtgctgttctgagcggttggtgctcagatactttgcatcctaagtattagtactggccgggcactgtggctcacgtttgtaatcccagcactttgggaggccgaggtgggtggattgcctgaggtcaggcgtttgagaccagcctggccaacatggagaaaccctgtctctactaaaaatacaaaaattagccgggtgtgggtgcgcatgcctgtaatcccagctacttgggaggctgaggcaagaaaattgcttgaacctgcaaggctgaggttgcagtgacccgagatgcgccactatgttctagcctgggcaacaagagcgaaactcggtcttaaaaaaaaaaaagaaagaaaaaggaaaagaaaaaacaaaaaaaccactaaatattagtacttcccacctgtgcatgagacaactgcaaatggcagaaattggggcaagtctaaaatcctggactggtttcttgcccagctgcccctgagagagagagagagagagagagagagggagagagtgtgtgtgtgtgtgtgtgtgtgtgtgtgtgtgtgtgtgtgtgtgtgttttggggaggtggtgccatggtggctcggcctctagttatatctccattctccccagggacgatctgactcagctgccctttacaactatgtgcattaaggagagcctgcgccagtacccacctgtcactcttgtctctcgccaatgcacggaggacatcaagctcccagatgggcgcatcatccccaaaggtgcctaccatgttccgcctgctgctggtgcactgcctccaatgatgtagctgctctattgtccacaggggcctggctatgcctgccccaggtgcactatccctgcagatgggatagctctctgtgtgcctgttgcttctggggtgttggagaaaacccagttgtgtgtgcagggagatagagccgggtgagtccaggtggaaaggaaggaggcagtgtcgcagggatgggcctgtgagggtgcagttggggagggtcagtttcattcagttgccagttactccctggagaccaagccctgccttggttgatacaggggaccctggctcaggttttgagtattgccctttctgggggagatacagcagggtgcagacattcccaggcgtatggaatcaggaatgggctaaagggagagacaggggctggagtagctccaatatggagaggaatgcagggagggctgcctggaggagggaatgtgggaggtgaggcttggagtgtggaagtgaaagagtgagcatgtttatggagtagagcctcaggatgcagattttgaaaggccttgagtgccaggtgatggcgcttgaactcaatcctgggggcagcagggagccaaggtaggtgtttgagctgaagaggagcaatgtcagatctgcgagtaagaaagatccctatgtggccagcttggcagccagaaagaagatgataggttcctcttagggaaaggtgggaagagtggatggggcagcagaattttttagagaaggatggacagaaggtggtggcagatggctcatgggaacatcatggctctagggagacccaagttgggggatgtttctggaggaggccctggctccccttggccccactgatcccatctttccccacaggaatcatctgcttggtcagcatctatggaacccaccacaaccccacagtgtggcctgactccaaggtgagtgcctgccccactcctccctgccctcaggtcctcccctcccctgcgccccagggagccagcgagcagggctggttgcagggcctgagtgcgcacacccctccccactccgcatttagccatttattcacccactgattgttaattcattagggcagaaaatatttattgagcacctactgtgtgccagagtgtgtgctgggctctgaaaatagaggatgatactgtctttgcctttacagggctcacagtgaagttttggggaagacaataagcaaataaataagattttgggtattgatacatgcacaaaagaaagaaaaactgggccagttccggtttacaggtgcagtggctcacacttgtaatcccagcactttgagaggctaaggtgggagaatcgcttgggcccaggagtttgagaccagcctgggcaacacagcgagaccccccatctctaccaaaaaggaaaaagttggcccaatgtggtggcttgtgtctgtaatcccagtgctttgggagaccaagatgggaagattgtttgaggccagaagttccagctcagcccagcctgggcaacacagtgagaccccatttctaaaaaaaaaaaaagttagccagccatggtgatgcacatctgcagtgccagccactcgggaggctgaggcaggaggatcgcttgggcccagcagtttgaggctgcaatgagctatggttatttatttatttatttatttgagactgggtcttgctctgttgcccaagctggagcgtgtgcagtggtgcgatcttggctcactgcaacttctacctcctgggttcaagagattctcctgcctcagctttctgagtagttgggattacaggtgtgtgccaccatgcctggctaatttttttgtatttttagtagagatggggtttcaccatgttggccaggctggtcttgaactcctgagctcagatgatccatctgccttggcctcccaaagtgctgggattacaagcgtgagccaccgcgcccagcctgcaatgagctatgatcgcgcttctgcactccagcctgagtgagactctgactctaacaaacaaacaaacaaacaaagacagacaaacaaacaaaaaaaaagaaaaacaggtggagggggcactttagctcgagtggttatgaaaggccttgccgaggagatgtttgagctgagaacttaggggatgaaggatcagggagaagcctgttctaggcagaggaaacagcaagtgcaaaggccctgaggtggaatctcactggtgcgtgtgaacaacagaaggaggcaggtgtggctgcattgcaggaagtgcaaggtggaatggaagaggtggccctggggtgctccccatccatctttactgacccccagaggctcagggaagggggccaggctgggatgtctggggcagcccccagactcatctccaggctgttcctccctaggtgtacaacccctaccgctttgacccggacaacccacagcagcgctctccactggcctatgtgcccttctctgcaggacccaggtaacccctctatttcccctagtccaagccagctgtgtaggaacagaggcagggaaagatcaggaatgtgcctctcaggagcagagatcagatggcacccaggcgtcctttctgaagacccagcaccctctccccaatgcgccaggaggcccccaaatcagactctgcaatagcatcctgggtattgagcaccaacggtgtgtcaggccctgagttctgggctcccacgctcccattggctctatgatgcctttgtccccgtttttacagatgaaggaactgagactcagagggggcgctgtgtatccaggacacacagctagtaagaggctgtactgggattcagacactcaaccccaaggtcacattaattgagcgatccgtggggtctcactttaaccctcacccagcgtggggtttcactttaaccctcagccagcccaggatgcttgcttcattttcaaaggaggcatgtgacccccggggaccagtgctcacacagaagctgggcctgagccctgtcccctcttcctccaggaattgcatcggacagagcttcgccatggccgagttgcgcgtggttgtggcactaacactgctacgtttccgcctgagcgtggaccgaacgcgcaaggtgcggcggaagccggagctcatactgcgcacggagaacgggctctggctcaaggtggagccgctgcctccgcgggcctgagcgtgggcgcgcccctgcggctcccgagggtccaggccccgcccccaaaggaccaggactcgccccaaagatcccgagggcataggccacccccctcgaagttcaggttcagctcctggatgaccaggcaccgctgttgagcagcctggtggtactggccacgcccctcaaggcaaggctcctccccttagggggcctgatcccgccccttgaggcttaggtcccgccccctgacttctcgcacctgtcctgtttgagggaccagggtcgaccctgcccccttgggctcaggccccgcccccaggatcctacggattgaggtcctcaggccacgcccctgcagatccaggtctccaggccttgcccactgagccttcagaggacctaagacccacctatgactcagggcccaccacaccccacccccccccaactggctgaacccctggcaggcttccaaactgaggaaagctggagcctgacgtcagagcttttaactcggacatcaccctcctgaggccctcagctcatacgggcagactgctcaggcgtgaggctggatcgtagggttcgaggctgcttgcttttgttgttgttttgtaaactcagacccttgtaagccccttccttcctcccttgcccaaagatcctttgctgagtgttctgtttttgcagaataaaagcaaaggatgcagacttaccccaccctccacccctagctcagccagatccttacacgtggagcccccagcatgggaatgaggggctctgcaactgagcgaagctgcgggctaggaggctggaaagccatttatcctaggacataaactcagattttgggggtcagtttgtgtgttcatttatttcatcaacagatcacatattgtttgctggcactgcttcagaaccacaggcaggccctgttttctgccttcttagggggtgggggacagatgttgaacaaataattccacgtgtaaaggtttatttacaacccaggacaggtgctccaaaggagaggccccgggtgctggatgaatatagcagagggatggggatgggtcagggagagcttctccgatgctggaatggaagttgagtgggtgacaaggggagggaagagtattccaggcagaaggaacaacatctgagaataccctgagctgagggagaacagagtgtgtttgaggaactcaccaggggccaggtggttggatctgggaagtgggggcagaatgaaggaaggggccaaatgcacaggctttatgctgagggcaatagggagccatggagagtgtgtgagcgggatcaggacaggacatggccagatctagggctggcagggaggtgacttgcggggttgggaccctgggaaagagggaagctgaggtccagacaacaggaagggccaggattggggtgactatctagcagtgggggctgaggggagggaggtggtaagggtgatgctcaggtatttggctgagggaacttgatggtagagtagtccctgatatgggaatataaaagatgggggccaggcgtgatggcttacacctgtaatcccagcactttgggaggctgaggctggaggattgcttgagaccaggagttagagaccagccagggcaacacagtgagactccatttctacaaaaaataaaaaattagccaggtgtgatggtgcacatctgtagtcccagctacttgggaggctgaggcaggaggatcacttgagctgaggagtttgaggctgcagtgagctatgatcacaccactgcactccagctggggcaacagagcaagaccctgttccaaaaacaaacaaacaaaaaaaggtgggcaatgacaatgtcagcaattttatacatataaaatgctacactaaaggaaaatgatactgctattataccacatatataatatatatatatgcactatatatgccatcattatatatatagtggtggtataatagtggtatcatcttccttttaggtagcatttgcctgtagactatttccatctaggtcactagagacaataatattaattcaacaggccgggtgcggtggctcatgcctgtaatcccagcactttgggaggctgagacaggtggatcacctgaggttaggagtttgagaccagcctggccaacatggtgaaaccctgtctctactaaaaaatacaaaaattagccacgtttgatggcgggtgcctgtaatcccagctactcagtaggctgaggcaggagaatcgcttgaacctgggaggtggaggttgcagtgagccgagattgtgccactgcactccagcctgggcgacagagtgagattctgtctaaaaaaaaaattaatttaccaaatatttcttgggcaatctgccgtgagacaggcactgtttgagccctaggttcccagagtttacctctagggaggagatatgataaatgataaataagtaaagaaagaagtaaattcacacagggccttttctgtgactttttttgtgacagaaatggggagttctgagcagaggagggacaagctttgtcatacgaacttttttttttttttttttgagacagggtcatgctttgttgctcaggctggtgtgcaggggtgcaaccatagctcactgcagccttggcctccttgggctcaaacgatcctcctgcctcagcctcctgagtagctgggaccacaggcacacaccaccatgcccagctaagctttgtatttgttatcgagacgggggtcttaccatgttgcccaggctggtcttgaactcctggtctcaagcgatcctcccacctcagcctcccaaagtgctggaattacaggtgtgagccaccatgccaggacttccacaggactttgtgtgctctgttaaacagagacagtgtgagcaaagatgggactaggcagatcagttaggggtgactgcattcgtccaggtgagacatgatggtggcttcaaccaagccggggtctttagatgtgatcaagagcaattggattccaaggaggagtgactgttcacaaaggcagtgctgtcaggcttggtggtggataaaacgtgaagtttgaaagaagtgggggacactaggtttgggcttgaacatctggaaaaatggaactgccatcagctgacgtggggaatgctgagtggagtaagttgttttgtgggagatgtcaggatgtcagttttggttcagaggaattggacatgtcagtcgaataaacggttctccaattcaagagttttgggttgggcatgtatatttgggaagccttagtataaatattttatatatttttccaaaagctagtgaagcgatttcaaatgggggtgatttttcctaccagatgacattcgttgttatttggaaacatttttggttgtcacaaccggtggttactatttgcgtctagagggtagggacccagcactctgctaaacattctacaagacaaaggatacctagctcaataaaacaagtaattatccagtcccaaaggcaacagttctgctaattaaaaaccatgaactggagaaccaaaacaaacaaaaaaaaaaaaacaaaaaaaaaaaaacagaaaagaaagcaaaactttaagactgggtgagatctcatgtgtgcgtgtgtgtgtgcgcgcacgcgcgcgcgcgcgtgtgtgtgtgtgtgtgtgtgtgtgtgtgtgtatggagtaagggcttaagggagccctgggggtggtctccaaagttaacctaacaattatgaggccaggcgtggtagctcacacctgtaatcccagcactttgggacgccggggtgggcggatcagttgaggcgaggagttccagaccagcctggccaacatggtgaaactccatctctacttaaaatacaaaaaattagggcagggcgcggtggctgactcctgtaatcccagcactttgggaggccgaggcgggcggatcacgaggtcaggagattgagatcatcctggctaacacggtgaaacactgtctctactaaaaataaaaaaaaaatcagacgggagtggtggcacgcgcctgtagtcccagctactcggtagggcgagacaggagaatcgcttgaacccgggagacggaggttgcagtgagccaagatagtgccgctgcactccagcctgggtgacagagcgagactcggtctgaaaaacaaaaacaaaacttttttttttgattgagtgcttcctgtgtgctctttccatatattcccatttaatcctcatactgacttgtaagatcactttttattattccgtttaacagaggtagaaactgagcccccgaatgaagtgacttacccaagatcattcggtgcggcctcagcgctggcgctgagtcctcttctgccccacccctcaggctcccagtcctggtctagatccctagccacgtagcgtagaagggggcgtcgacgggggttgggctagagttggagcggggaggagatgagctaaagcggggctggctgtgcgagaggcagtagcagcggcgtgtgtcctggggcgccccccggtggcctgtgctggggtcgtcggccgggatcccctgttcgacgtactccggggctgaatgggaaacagacagtcccagaccctacgtgagccacccggatcttgcaggtgctgcctctcctacacccccctcccaaccgagggtctccaagagcgcatcctttgccaaacatctcctgggcccttttcggcgcaacctcgccatccactagcaaacgaagttagccttgagatccgacatatgtgggctcaatctaggctcttccttcctaggggcggccttgggcacgtgactgtccctctctgcacctcggctttttcttgtcatgcgaatagtccggtatcatcatgcttgtaatgcacactgagtttccgccaagggccacgagggtgaataaatgagaatgagaaggggaggagtaaggtccctgggtccccggagccctgttacacgtactgcaagtgtaattctcaaaacaccgaagtctggtcctgtcgctggcggctgtgggacctccttcctcctgagtgtgaagaacgctccctctgctggacaatttggagatccattctctattcgttcaattttgtgtccgtgcacgtttgagcgtgcatgtgtgaccgcgtatgtgtttgggtgcatttgggtaacagtgtgtgcatgtgttgtagtgtgcacacgagtgtgtgtaaacgtgtatgtgtcggtgtgactgtgtgtgcgcatatggatgggtgtgttggaaggagaggagaggagaactccactcactgagtcactgtaactatccacacacaccaggctgtgttcctgctcatggctggagccactgtcagagcccttgcctctgtccccaggtctgacctgtgcggtgcaggcaggacattctggagaaatcatgcccttggaggaagctgtcagtaatgactggtgggtattggtggataaataccccagctccctctctctgggggtgaagactcccttgttctgggaggtgcatgttctattctgtctccctgaggtactaggcagggctgagccctagctacccacagtggaaacttcctcaataaaggtccctttaactgctgctgccttcccttccccatccctcttctccattgccctaattgtgtttccagggatcacctcccaaagaaacaacaggcagttgaactcttgtcttatggtcaccctcctgatagaggatttgcactcaactccttgtattaaggtctagttccagggaacccaaattaagacacacatgtgtgctggttcctccaatccccagaagcctgtcagtgtgcgcttttatttattttttttaccaacgatgaatgtgaggctcagagagggcaaatcacttgcccaaggtcacacggcagtgagggagtggcagagcctggctttgactatgggctgtctgaccacaagctgggtgctcactcctctcctgacagcctcctccctcctcaaggacatggaaggagcagggaataagttataagtgtaaaatttgaaagggaaattcttccgctttctgcttctgcttctacctctggcccagcagtttggtgtgctcttttttcagtttttaaaaattaaaaaacgttcatatatatatgaacgttttccaatgtatataaaagcatttatgcacacgttaccgggttttttttgtttattaaaaaaattttttttttggagacagggtctcactctgtcacccaggctggagtgcagtggcatgatctcggctcactgcaacctctgcctcctgggttcaagtgattctactgcctcagcttcctgagtagctgggattacaggcacaccaccatgcctggctaattttttttttgttatttttagtagatatgaggtttcaccatgctggccaggctggtcttgaactcctgacctcaaatgatccacccaccttggcctcccagtgctgggattacaggggtgagccactgcacccggcctttttttttttttctttttttgatacagggtattgctctgttgcctaggctggagtgcagtggctcaatctcaactcattgcaacctctgtctcctggggtcaagcaatcctcccaccaccacatccagatgcttttttttgtattttctgtagagatggggttttaccatgttgcccaggctgaactggaactcctggattcaagtgatccgcctatgttggccccccgaactgttgtgattacaggcctgagtcactgcacccagtccattatcagttttttgatgactccaaacttgttgggaaatatatctgtttcaattatctattattgtatattgaactaccaggaaacttagtaggttaaaacaatatacaggccaagctcggtggctcatgcctgtaatcccagcactttgggaggccgaggctggcggatcacctgaggtcgggagttcgagaccagcctgaccaacacggagaaaccctgtctctactaaaaatacaaagttagccgggcgcggtggtgtgagcctgtaatcccagctacttgggaggctgaggcaggagaatcgcttgaactagggaggcagaggttgctgtgagccaagatcatgccattgcactccagtctgggaaacaagagcgaaactccatctcaaaaaaataaaaaagatatacaagttttttttttttttttggtatgtgtgtatgaactcctatctgtatcagaatatatacaacttttagtttgctcacaagtttacaatttgggcagggctcagccaggatggctttctcagtcctacacagcatcagtgtgggcagctcatttgaggctggaagagatactttgaggtggctcactctcatggctggcaatttggtgcttcctatttgctggtaccgacttcctgcctcggcctctcaaagtgctgggattacgggcatgagccacaatgccctgaccattttattttttcttttattttctttcttctttctttttttttttttttttgagacagggtattgctctgttatccaggctggagtgcagtgatgcgatctcacctcactgcaatctttgcctcctgggttcaagtgattcttgtgcttcagcctcctggatagccaggattgcaggtgcatgccaccacacctggctaatgtttgttgtgtttttagtagagacagggtttcgccatgttggccagggtggtctcaaactcctgacctcaagtgatccacctgccttggactctcaatgtgctgggattgcaggcgtgagccactgcacctggccaaaatatataatacattaaaaaaataaagtttattaaaaagaaaaagaagagaggaaatcactgagtaacatcgagtaacatgctctggtggtggttcctagctcttgtgtgacctctgaacttttccaaagttcccttctaggatttctgtctcccaatccagttcatctggtcttctgtcacccgggctgcaaatgtggcagttatagctatacctgctggtcctgccctcaatatggactaaggggcttgttgggtttgcaattcttcttcttcatcatctttttaatttttatttatttatttatttttttgagatagggtttcactctgtcaccaggctggaatgcagaggtgcaatcctagctcattgcaacctcaacctcctgagttcaagcgatcctcccaccccagcctcccaagtagctgtgaccacaggcatgtgccacaacacctggctaattctttgtatttatatatgtatatatatatatatatatatttttttttttttttaaatttactttttcagagatagggtctcgctgtgttgctggtctcgaactcctggggtgaaacgatccacctgtcttggcctctcgaagtgttgggactgcaagcatgagccactgtgcctggctgggttttgagttcttgagagtgttaaatgaaacttcaacactggcttctggtgtgagcgttgggtgagatttcatcggtcaccacatgggtctccagtgcaccctgcttctcctgcatctcttggttgcaggcacccctctagctctgattatctcagtgcatttgaggatggaagtgagaatgaacatgtgtgtcccacctggtgctgggtctttatacagtggcccttatgcagagccccctcctttatgtcattcaggttcctgctcaaaggtctcctcttgggacattcctgcctgatcactgagtccagaacagccccctcagtcgctgtctagcttgtctcattctgttaatttcccataagagaagtggcatgtcaccatcaccatgcactattggttaagcaacttgagtagcttgggacctcagcctcccaagtagctgggaccacaggcatgtgccaccacacctggctaatttttttgtatttttgtattttttttgcagagatgaggtctcactgtcacccaggcactataggttaagcaaccaatagtgtgtggtggaggtggtgacatgccacttctgttctcaatcccaggccagtccagattcaaggggaaagaaattaagctctccctcttgctgaagacagtgacaaagactttgtggctatcacctttaaggggtctgggttagaatctgagattctgcatttccaagatgctgctgatccaaggatcacatcttgagtgtccacttcttatagctcatggctagaaaagtccctttcttccctaaatatttaatgagcacctactacgtgccaggattcattttcacccatgctaatgtttaattacttcattgtgtggctggagcaagtttcggcacctctctgtttttgattttccccctccctcttctccccagacctagctgggcacctaccctgttgcctcccacctactccagggggccctggccttgcccctggctcgtctgtggggtggaccaggtggagccaccccagtagagaagaaggagaatctgtacatctcagcttgctggcagctccagggccctccaacgtgctctaggacctgaagctggatcaggcagggctacatggtatgtagttagctcttagtgggggaaggaaattttggacatctccccaacattcgatcaattacaggaggaacacctatcctgattttctcattcagcagctccatccttcaaacttactctcatcttggggctgggcttgagggctcacgcctgtaatcccagcactgtgggaggccgaggcgggcagatcatgaggtcaggagttcaagaccagcctggtaaacatggtgaaaccctgtctctactaaaaatacaaaaattagccaggcgttatggcgggtgccagtaatcccagctacttgggaggctgaggcagaagaatagcttgaacctggaggtggagcttgccatgagctgagatcgcgccactgcactctagctttggcaacagagcaagtctccacctcaaaaacaaacaaacaaaaaacgaaaaaaaacccaaacaccaagaaaacagaaaaccccactcaccctcatcttagcgcctgagggctaagaacacccaataggggatttcaggacagtatctgaacaagatgtgcccctttaaggccaacatcccatttcccagataggaagacccagtcccggagacccagcactgcccacagtcagagcaaggacggggcagaatgaggactccactcagagtcactccgctctgcccacccacgcctgccccctgtccgcccacagcccctctcactcttgccccctatgcctcccaccccaccttctacactgaataaatcttcccattatagtgatcccagagtcagctacttaagagtcttggccaggcgtggtgactcacgcctgtaatcccagcactatgggaggccgaggcgagtggattgcctgaggtcaggagttcaagaccagctgaccaaaatggcgaaaccccgtctctactaaaaatacaaaaattagttgggtgtggtggtgggcacctgtaatcctagctacctgggaggctgaggcagaagaatagcttgaacctggaggcggagcttgcagtgagctgagttcacgccacctcactccagcctgggcaacagagcgacactctgtctcaaaaacaaaacaaaataaaacaaacatcaaaaaaatgaaaaaaccccactcaccctcatcttagtggctgagggctgagaacacccaacaggggatttcaggacagtatctggacaagatgtgcccctttaaggccaacatcccatttcccagataggaagactgagcccaggagacccagcactgctcacagtcagagcaaggacggggcacaacgaggactccacccagagtcccttggctctgccctcctatgcctgaccctgtccgctcatggcccctctcactcttgccccctgtgcctcccaccccaccttctagactgagtaagtcttcccattatagagatcctagagtcagctacttaaaggtcttggctgggcacggtggctcacgcctgtaatcctaaaactttgggaggctgaggcgggtggatcgcctgaggtcaggagttcaagaccatcctggctaacagggtgaaatccgtctctactaaaaatacaaaaaaattagccaggcgtggtggtgggcacctgtagttccagctacttgggaggctgaggcaggagaatggcatgaacctgggaggcggagcttgcagtgagccgagatcacgccactgcactccagcctgggtgacagagcgagaatccgcctccaaaaagaaaagaaaagaaaagaaaagaaaaaaaaagagtcttgatgagtttcacttgctgctgaaggcttctttcctttctatctagtttcctaatcctcactgctgtgcatgcagataaatctgttttgcattaattaaaacaaacaaaaccgaccacagctgcctggtttactcttccagttctcctcttaatccccagaatctgacctgggtaatcctcagcggggctggattctttgttctttgttcctgctcctggccatcatgtgtcacctcagccctgggctggctggaggcaggacttgaatttctgccaggttgtgcagtcagaggccagagactcccttctccaagtctcctaattctgcaccgagaaatggtgcatggtgtcctcccagcccacttgtgggagatgtttgggtgcaaggcttggcctgcctggttctccttgcctgacgcctgaattcccaacctcatgatttacgtggccttggaagggcaggggcagctgtaaacttggggtcccagagtcaccttggccccaggttcaagcaggagatactgaaggctgaagatccagtttccactctgaactgtgacactgacttggttcctctctgcacccagctgatactgcctgcaggttttggccagctgcccaggcagggaggaggcagccaggcctatggcctacggggattggctgcccctgactgcccagcccagcccagccttgcctaggtgaggggccagggacaaagaagccccaggaggagggaagaggaagttgtgtgggacaagctgctcctgacagaaggtgccaggctggaactgtcggggctggagggtcctggtctgggagagggaggggcactgcccaaggctggggtggctccagggagctggtcctggtggggctgatgggttcctggtaactgaaaccaagccactgacaacctgcagtgattcaggctgggcctttcaggactctaatcagccttcctctctctctttctctcttccctctctcttctttactctcttctctctccgcctcttctcctggctgtacctgggtttccctctctgctttcagcccttgttttctcatctctgagctctccctgcctccagcacctcccatccctgcccctgtccaatgtccccgaagctccccgggctctttttctgggcctcaggacctcaccctccatcccgtgtgccctgcaggatgtcgctgctgagcctgtcctggctgggcctcgggccggtggcagcatccccatggctgctcctgctgctggtcggggcctcctggctcctggcccgtgtcctggcctggacgtacgccttctatgacaactgccaccgcctccagtgtttccagcagcctccaaaacggaactgcttttgaggtcacctgagcctggtgagtatggcagcacgacgggtctggggtctcagggtgggtggacttctagaggggtgggaatggggctcagggagctggatattgagggtgggttggggtctgggacatcagaggagtgagggaggccgaggggagcccctatttcctcactgccccaaccggattcattcctcctctctgtccactccatggccccaggcctttttctttctctctcttccccaccctaagcctgctttggctcaagttcctacttgtcttccccacattaatgcatcgttgtatccttgttctactgggggcttctagggtggactgcacagagcaggtactccctggctgcccatgttttttttttttttttgagacagggtctcgctctatcacccaggctggagtgcagtggtgcaatcatagctcaccgcagccttgacctcctgggctcaaccaatcctcccatctcagcctccccagtagctgggactacaggcgtgcaccaccagacctgctagtttttttttttgtagagacagggtctcactatgttgcccagagtggtctcaaactcctggcctcaagcaatcctcccatctctgcctcccaaagtgttgggattacaggcatgaaccactgcacttagcttagtccacaatccttatcactggacttgaggtctcctcacggggagagtccagagtccactctctgcctggcccatctctgtgggcctcaggctggtgtctactcctctctgggctgctgcctccccataagatttgctatttctccctaccgcacccacagggcacagctgggccagaggaaagatgtggctggtttctccctccgtgtctttaatcaggcacctttttttcttatatttccctccacccctaagatatgtcaatgggccccattgctcagtttggataacagttgactacttttcctttcagaagggatcattctggcctctgccctaacagccaaattccctgggaggagattcctcatctccctcatcctagcctcccccctagaggacttttctccatgctgtgttggccctctactgccagaatcataccttgggttggtcattatctgtaaaggcgccactccaatgccattgattcaagtgttgccttctctgaccacaatcccttctctccttctagctttttctgttcactatctctcaaccttttttttttttttttttttttttgagatgtcgtctcgttctcactcgtgcacaccaaggctggagtgcagtggcgtgatctcagctcactgcaatctccgcctcccaggttcacgtgattctcttgcctcagcctcccaagtagctgggattataggcgcccaccatcacgcctggctaatttttatatttttagtagagatgaggtttcatcatgttgtccagggtggtctcaaactcttgacctcaagtggtctgcccaccttgacctcccaaagtgctggcatgagccactgcacctggcccactgcttctcatcttacaccctgttgggacttccagttctctctacaccccagtctagcagcttcttccagtccttcctaggcatagttcctattatttgctcatgggctggtttctggccaatgggactttctttcctggccatttggaagacctttgccttagatgagctcaatcgcccatgttctgtctttatttttcattttttatagagacagggtctcactatgttgcccaggctggtcttgaactcctgggctcaagcaatccacctgcctcagcctcctaaagtgctgggattacaggcatgagccatggtgtctggccacccgtgttctctttatttcttctctacaacaatattagagaaggtcacaaagcaggtcagatgggtgatatgtaaattccctcccacccacctcctgtgcaccacattctgcgcccagaccttcagcctgcttgctctgctgtcccctcaaagacagagttgccttcactcactccctttgtttctctgatcgcccctcacctgctctccaccccatcctgctgtcttgaggtgaccgtgaccctcaagcccccaaatcccatggacacctcccagccccaactcatctacctcccagcagctctctgaatttgtgactactcagtcattcccagtacctccttttttcttggttccaggacgttgccattccctggtctcctctgaccttcgtgtgctcccgtgtctctgctgttggctcctcactatggggagatcccccatggtcctagtcattcctccctcttgcctctctcctgaggtcacctccttacccagggctccagcttctaaattgaccatcggttccctctagaagtgagctctgagtttacatctcctgagctggaggtcattgcttctctcctctcggggtgggggtggtctcagaaacacttccattccgatcggtttgaatctgaactcatggcccccctccctacactgtcccccattttggtctagtccttcagtttcccagaccccacgctttggggtctcctgatgttctctttctctcatctgcacatcctgtccctcagcacgtctgctggtgctgcctggcacagtctctcctccgtcaattccttctctgagtcctcctgcctcccctggctccatcccttgccacctctctcctggatgcctcccacgggcgcctccctggtctccctgttgccgtgcccaatcctttcctccactctctcctcagtcccggacaggctttttccttccttccttccttccttccttccttccttcctctttctttcttcctttctttctttcctttcttcttttctttctttctctttctttctttttctttcttctttcttttctttctctctatctctttctttctcccttccttccttctttctctttctttctttctttttctgtctaaaaaaggaaaccatttataaaaattacagacaaaagcacacaaattacactacaaatccattagagatactatcaattggctaacaggcaaaagttttgcctacacagtttgaataaatagagacagagattatcgacaaatttaagaaaatcgatgcaatctcataatcaataaagacaatttcagatgtgaccttttattttatttttttatttttttgagacagggtttcattgtgccgtccaggctggagtgcagtggcatgatctcggctcactgcaacctccatctcctgggttcaaatgatcctcctgcctcagcctccctagtagctgggactacaggcatgtaccaccatgcccggctaatttttgtatgtatatatatggtttttttcggagacagagtcttgctctgtcaccaagactggagtgcagtggcatgatctcggctcactgcaacctctgcctcctgggtttaagtgattctcctgcctcagcctctggagtagctgggattacaggcgtgcaccaccatacccagctaatttttttttttttttttttttgtatttttagtagagacagggtttcaccatgttagccaggctggtctcaaactcctgacctcaggtgatccgcctgcctcagcctcccaaagtgctgggattagaggtgtgagccaccacacccggccaagatgttacttcttgactattacattgataaaggctttttaaaaacatataaggccttcagtgtgtaatgctgtccaccttcatacggagcagatatgcatgtggatatttataaaattcttcttcaaagtaattttgcagtatatatcaaaaacttcaaactataccaatgacttattttgaggacactatattcagttgataatcaggtatatgtaacataattacatgagacttccattgcatttgttatgctagtaataaatagtaaacatgttttcaaaactagtgaattaattatggtaaagccatatggaccactgcaagttccctgagagcaaaagtgacttcacctgtcctatcccctgctctatcacctgaatgtagaatgcacacagtctatcttgaataactatttgttgaaggaactgtatgaaaacattaatcattatgcttgtgaagactgattgaagaataattaaaacatcaagctacatgaaaacatgacacagatcttatagaatgagagctcaggttttaaagtttgttatttgcaatgaagtaaagagatgagatggctggtgcagtggctcatgcctgtaatcccagcactttgggaggccgaggcaggtggatcacctgaggtcaggagttcgaaaccagcctgaccaacgtggtgaaaccccatctctactaaaaatacaaagattagtcgggtgtgctgatgggcgcctataatctcagctactctggaggctgaggcagcagtatctcttgaacctgggaggcagaagttgcagtgagctgagatctatccattgcactgtagcctgagtgacaagaggaaaactctgtctcagaaaaaaaaaaaaaaaaaagatgagacctggacagacttttttgatagactgagccacttattgggaggcggaggttgcagtgagccaagatggccccattgcactccagcctaggcaacaagagtgaaattccatctcaaaaaaaaaaaaaaagtggctgggtctcattttcctctttattggtttgtgccacccaacatcatacgatctgtcatcagcaccacaggtgctcactcagaacacctggaagtgggtgctatggcagtgtccaaagcctgtgagccccttcttgcccagcttatgtgttgatcctgtaggacccaaggtccccgtggctctggacgcccttggtcatcttttatttctttcatttatttgccaatctccatcctagggatccttggagagactcagttgaggttctaccttggaggcacccccaatcttggggccacagaactagactgagacactccacatcctgtgtggtcagggctggcttgaaggagagatggactgtaggacccctgaggggaatcagggtttttgccaatggggcaggcaggcaggcttcctggaggaggggtttgtggaagtgggtctggaatgatgagtaggaatttttttaagcaaagaagagaaagagaaagataatttcatgtggaggttgggccaactcgaagacttggaggtgagagcaagcacctggcttttgagcagcaagaaagagcttggtgccaccagaacaattaggatgagaggcagaagaaagagggaggggaggagattgattctgaggacaatggggagccctggagggtgtgtgaacaggagaggggcaatatcagctgactggctccttccgttgccccacctggtttctctccctttttatcaagctcctttctatagcaacccttgcagaagtatctgcaattcaggttttgcttctagagagcccacactaagacagggccttatgattctccagtcattcctctcccactgacctgctacctctgctcttgttctctgactggcttctacccattttcttccacttccttctggatctcttctgggcatctccttcagtctttcccagctggctccagcctgggcacagttgtgggagtgatgggagtatgagacagaacattctcccatgaactcaaattcagggctatccttggggtgggatgtggagcctggtctgggggtggtgcagccaggcttgggagaaggggctgtgtctacatcttccccctgctaacttgctgcaaagctgggggtacctgtctagagctaggggcaggaggctgtgctgggactaggggacaggagagaaagttcaatggactgagattcattatgaatttgggataaacagcaagtggggtgaatggtcaagtgttggtggggagagacagggagagggatggagagttggacttgggagagacagtgatagggaaaaagatgctcacacagagaaagagagagacagtgagagacagagtgagggagagagaggggagagggagagaaagacacagagaaagtgacacataaacagaaagtaaaagaaacacatagacacacatatctaaatctgtcattgatcatatctgtcatctatgtagccatcactcatacatctctctcatctatacctgtctctcttatctctctatccatctatcctatttatcatctatcgatctgtcacctacctttctctttctctcatctatctgtctatcgtattatctacctacctacctacctatccatccatccatcctgcctgtgcatccattcatccttctatctatcctatctatctatctatctatctatctagctatctatctatctatctatctaatctatcatctatccatccatccatcttatctgtgcatccatacatcaatccatccatctatcctgttatctacctacctacctacttatatacctacctcctacctacctacctacatatccgtccatccctcctatctgtgcatccatccatgtatcctatctatctatctatctatctatctatctatctatctactttttttttttcaagatggggtctcgctgtgtcacccaggctggagtgcagtggcgtgatcttggctcactgcaacctccacgtcctgagttcaagtgattctcctgcctcagcctcccgagaagctgggactacaggcatgcgccaccagacccggctaatttttgtatttttagtagagacaggggggtttcaccatattggtcaggctggtcttgaactcatgacctcgtgatccacccacctcagcctcccaaagtgctgggaatacaggcatgaaccaccgcacctggcctatctatctatcttctatctatctgcttgtatatctaccgactgaccaacctacctacccatttatccatccatccatccagcgatccatccatccatcctatctgtgtgtccatctgtccatttaatctatctatctatctatctatctatctatctatctatctatctatctaatctatctatctatcatctccctccctccctccccacctacctaccaatccatccatgcatccacccatcctatctacgggtccatccaaccatctatcttattatctatctgtctgtctatctatctatctatctatctatctatccatccatccatccatcatctacatatctatctagagaaagacacagagagaggaagagagtgagggaacagagaagcacatagacacagacacagaaagagacaggcagagaccaatatttcaggtgaaagggctgagaagtttgggggtgtgtggtgggtaggggggtgcaatgggcagtggtagcatctgaggccccctgccagcctggtgtcagccttgtctatccccagatgcggggcaatgaggaggacatgaggctgatggaggatctgggccactacttccgtgatgtccaactctggtggcttgggtctttctaccctgtcctgcatctcgtccaccctacgttcactgcccctgtgctccaggcttcaggtatctttctcaggaggctatgctgcagcatcttccctgcctctgctccctgccttcccaacctttggacaggccatgctgagcagaaaaatggacatatccaatagagaccatggctctgccactaacctgctgggtgactctgggcaggtccctggtgctctctggctcctgaggcctcttttagttctgaatgaagaaaactcaaccctgtgtggtctaagcaaagaaacagaatgcattgactgtaaagtaaaagtcaggaagtaaaagtgaagtccaggaagggtggtcttcaggcatggctggatccaggccatcataatgccagtcttcatctcttagctttgtatccctctgtgatggtttcactctcatgctgctaaagataaatcccagaagctcaacccccatggaaaattccctgtagttccaggaaaatttccaggattcccctaaatttgcctggcctgggtcacaggaccaatttcttatccagtcactgcagcttgattgcataggtttaaggtcatatgcttagctctggagcaggggatgagaacccactcaactacttggattgagagtggggaaggcatgaggaggatggatgctggacgggcagataccaccattcaccagacatccattcaccagcatccctgtgagataggcatttcctgagtcagaaaactgaggtgcagagaggtgcaatgacttctcaaggtcacacagcatatcgaggcctccctcttagttctttttgtaatttttttgagacagggtctcactcattaatgcttattgtggagtgtggcaggatactgaggaagcctaaatcaagcctaggttacatgtgggatgctaataggaccagatttaaatcctatctggggcccatctatagggcatgtggaagtcattttagactctctcaggtccatgtctgagcatgccacatcaggacaggtcatgtatattgtgtcaatgtcagaacatgttaacgcatctcaggctatgccacatatctcaggtccatgtcagaagatgtcagagagtactgggcagacagggtgtcctaggtccttttttttttttttttttggagacagcgtctcactctgtcatcctggctggggtgcagtagaacgatcttggctcactgcaacctccgcctccctggttcaagcaattcgcctcccgagtagttgggactacaggcgcccgccgccacacccagctaatgtttttgtattttttagtagagacggggtttcaccatgttgcccaggctggttttgaactgctgagctcaggcaatccgcccacctcagcctcccaaagtgctagaattacaggcgtgatccaccgtgcccggctagggtgtcctaggtccttgtaaaggcattttgtagagcgttgagctatgctcaggtgttgcagaacatgttggaccatgtaggagccatgtcaaggcgtactggggtgtgctgtgccatgttgggctgtgtcattgttctactgcaccgctgcagcctggtctggtccccagtctcctcccctgtcctccctccttcctttgcccttgaccctcttcctgctatgctgggcctggagggtggaagtgcaaatccctggctgggagcctccccctacactcaaagtccctcccctgcccctctccataacccctgatggtccttattcatgtcagctgctgttgcactcaaggatatgagtttctatggcttcctgaagccctggctgggtgagtaactagatgaatggggatggggacaaccttctggggccaggggaaggtgctgtccttgcccatggcccttggctgcctctactaggggatgggctcctgattagtgccggtgacaagtggagatggcaccgccacctgctcacacctgccttccacttcaaaatcctgaagccctatgtgaagattttcaatgagagcacgaacatcatgcacgtgagtgccacaaactcggatcccagctgggcccttggaaaaggagaagtgacctcagacagatctggtctgaaatgctggctctgctgggtggctttggtgccatagctcttcctccctaggccttggtttcttcatctgtaaaatgtggataataatttctacttaaagggtggtcaagatcttgtaccgaagtcatgttcttggcacatagtaggtgttcagaaggcattaattactagtctccctcacagaaaccttgcaaactaataaagacagttatgatgaaatttggataatggcagggcgcagtggctcactcctgtaatcccagcacttttgaggccgaggtggatcacttgaggccaggagattgaggccagcctggccaacgtggtgaaaccccatctctactaacaatacaaaaaaataattagctggtatggtggcgcatgcctgtaatcccagctacttgggaggctgaggcaggagaattgcttgaatccaggaggcaaaggttgcagtgaactgagattgtgccactgcactcctgcctgggcgacagtgagactacaagtccaaaaaaaaaaaaaaattgcatatagctttttctgcatagcaaaccactttaaaactcactggccctggtgggccaaccagacacttccatttgtcccttattttccaggaggctagcctgggttcactaccaccatggagcctgagtttcaagagagtgagcagaaacattttagtacctcctgatgcttagttcagaactagcacactagcatttttaccacattctcctggtgaaagccagtttcaagaccagctcaaatccaggagatggagactcaggctctgcctgcaaatggaaggaggtgccaagtctcatcgccaagggtgaggggcaaaaagttggggacatttctgcaatcacttgcctctgtgctaatgatgaggatgataatgatagctaacatttattgagcacttagtgtataccagaaactatatgccaattccatgatctatgttgtctaatttaatattcacaatcctttgaggtagagatgatcataattgccacattatggatgaagaaattgtgggtcagagagattagggagcttgcctaagtttacacagttagaaagtgagctaaaagtggtggagaaggggttctaacctggttatctggcaccaaagcagatcatcttgttttgcttttttttttgttttttttttttttgagatggagtctcactctgtcaccaggctggagtgcagtggcatgatctcagctcactgcaacctccgcttcctgggttcaagcgattctcctgcctcagcctcctgagtagctggaattacaggcacctgccatcacatccagccattttttgtattttttggtagagacggatttcaccatgttggcccagatggtctcaatctcctgaactcatgatctgcccatctcaccttccaaagtgttgggattacacgtgtgagccactgtgcctgacccaaagcagatcatcttaactattactgaagatttgacaggggggacctaaagagggcagtgggctgaccaagggtacatagggcacagaagcagagctggaacttgaacccaggtcacccgaaccccagccttgggccttcatgtcctaatagtaacagcttctgtccctcacaagcttggtcctccttggggatgggtacccgggaaagacgactaggagttggttctgggggagtccatcctggaggttggggacgggaagggactcaggggagccagggctcagttcctgctctgtccccttctctggccaggccaaatggcaacgcctggccttggagggcagtgtccgtctggaaatgtttgagcacatcagcctcatgaccttggacagtctgcagaaatgcatcttcagctttgacagcaattgtcaggagtgagttcttccccaggacctgggatcttggccatggacccacaggagtaggttatggagagaggactgatcagggcatctgaagtgtcttcttggagaaaatgagtcagaattgagcatggaagtacagggaaggggagagagaaagatcagttctccaggtaggtagaagtgtttgggtaatggcaaggaggctaggatgagcagagcacgtgcaatggccatcaaggggacaccttggaaatgagattggaggggtcagcagtagctacaacttaatgacattgaaaagccatgcaaaggggtatgaacttcatccaaggctcccagggaatcatgggaggtatttgagaagatgagggtcatggtcagtgctgagcttggacgtttgactctgtggaagattgactgttatgtagacagaggaagcaaggagaccatggagaggaagaggcctgagcttggtggagaaaaaggggcagatttgagagaaaccaaggagaaataggcaggagcagatgttgtgtaagatgcccatgatggccaagctgtgccctggggcatctggggcaggaggcagctcacagagagtgggaggcagagagtgaagtgtgcttgcagggcacccttttctgcaccgaacgtggtcctgggattctggctagaaggtgctcccaggctttcatgtgtgtttagaagctgcttcctcttcctggcctgaccctgcgggaagcccagcgaatatattgatgccatcttggagctcagtgccctcagtctgaaacggcaccagcacatcttcctgctcacggacttcttgtacttcctcactcccaatgggcgacgcttctgcagggcctgtgacatagtgcacaacttcacagatgctgtcatccaggagcggcgtcgcaccctcactagccagggtgtcgatgacttcctgcaggccaaggccaagtccaagactttggacttcattgacgtgctcttgctggccaaggtgggctactctgggatctgaatttcagaagtagaatggactttgacgtgaaatgtcagatccatgaacttggacttgatccagagggcactggggagccatggaaggtgcttgaggaaaggagggacaagtaagatatattttagaggtgactctgtagaagagttcctagaaggagcaaacaggaggcaagagactgggaaagagtcctgctaggcaggtctaatgatgataagggaggaatcttgcctggaatatggatcttcatgaactgttttaggttagactcaggtgccttcatggctggtgtaatttagaggtcttgtcttgtctccaggatgaaaatggaaagaagttgtcagatgagaacataagagcggaggctgacaccttcatgtctgggggtgagggtcccagggtgtgatgtcactaggggtaggagtgtctccattccagggatgtggtgagtggaccctggatcaccccatcccatcttccttccccacttccttctgagggcctcaatacatgggtgctgtccacccttgggtgctgaagcagcccagagacccaagcttacctggctgcccctcaggccatgacacctcggccagtggtctctcctgggtcctgtacaacctcgcgaggtacccagaataccaggagcactgccgacaggaggtgcaagagctcctgaagaacggtgatcctaaagagattgaatggtgagtgtgcaggtcctcatgacctgttcctgagtccctctcattggtttagctcttcaggtgggaaagggagaaggtcttattggtgattgtgctattactgcctagtgggaattggtgcagagctcagaaacagggcctggtactcagcctggagcaaaggaaatgttgcaggatttttgcctttactatctattgcaattaaactcattcaattattttttcttttttgttacttctttcttttttcttttctttttttttttttttgagacagtctcactgtgtcatccaggctggagtgcagtggcataatctctgctcactgcaacctctgcctcctgagttcaggtgattctcctgcctcagcttcctgaggacctgtgattgcaggcatccgccactatgcccagctaatttttgtatttttaatagagacggggtttcaccatgttggccaggctggtctcgaactccagacctcaggggattcgcctacctcagcctaccaaagtgctgggattacaggtgtgagccacagcgcctggccaaacctattcagttctaatagatattgccgaattgccttttagagtctctgcactgattaactctccagtgtgttgtagaactagttctctttgtttcctcctttttgatagctgcatagtgttctctcataaggatgtactgtaattcatcaaaacatttctccattgatggatatttgtgtgctttccaggcttttgctataactaacatgatgtagtgggcacccatgtacactgaccattgcttacatctgtgagcagctttgcagtaccaattctgagaagtgcagttggtgaactgaagaccatttgagattgacaattcaatagctcctacacacacattttgagaatgccttcctcacattctcccctaaagtgtctattatgaaactttaaaacatttgccaatctgatagatgcaacataatacttcaatgaacatcactttaagcctgggtaaagttgagcattgttttcacttactgaccatgggtatttcttattctgtgaagtgtttgcacaatttgttccttctagtttgggttttgtagtttttttcttattgatttataagcactgctcacagattaagaaaactagttctttttttctgttttgcaaagttctttttcagattgtctttgaattaattgttggttttcattcatttattttggcttgattaatttatttgcagtcaaattctttcctttatacgtgccgttttttgttttttttattatttttattattttttttttgagacagagtcttgctctgtcacccaggctggacagcagtggcaccatctcagctcactgcaacctccgcctcccgagttcaagtgattctcctcctcagcctctcaagtagctgggattacaagtgtccaccactatgcccagctaatttttgtatttttagtagagatggggtttcaccatgttggccaggcctcaggtgatccacctaccttggcctcccagagtgctgggattacaggcgtgagccactgcgcctggccatgtttttgtttttttaaatcatgcatgggacattctttcatgctctaaaattaaaatgtaaaactcatgtttgttttcctctgatgggtttatttgtttttaaaatattttatttattattttagtttaaaaatatttattacttttttctctatgaagtctatgatagtataagaattgttgtaggaatgtattcattttcctccaaatggctagttgccccaacagaatttaatgaatattttgtatttgtcttacgattttaaataacagcagattcacaataagtgaaatttatttatatatttgggtctgtttcttgggctttattctgttccacttaattttatttatttatttatttatttatttattttattttttttttttgagacagaatcttgctctgtcgcccaggctggagtgcagtggtgtgatcttagctcattgtaacttccatctcctgggttcaagcgattctcctgcctcagcctcccgactaactgggactagaggtgcacatcaccacacccggctaatttttgtatttttagtagagacagggtttcaccatgttggccaggctggtctcaaatttctgatctcaagtgatccgcccaactcggcttcccaaaatgctggggttccaggcgtgagccaccacgcctggcccagttaattatatagtcatacataagcatcaagatgtcttcatcattatactttaaataacactttcatatttgataaaggtgatcctattttattactttgcttttacaagtttttctttttttcttttcttttcttttttttttttttttgagatggaacctcgctctgtcacccaggctgaagtgcagtggtgcaatctctgcctcctgagttcggctcactgcaacctctgcctcctgagttcaaactattctcctgcctcagcctcctgagtagttgggattacaggtgcccaccaccacgcccggctaatttttttgtatttttagtagagacagggtttcaccatgttggccaggctggtctcgatctcctgatctcaggtgatctgcctgcctcggcctcccaaagtgctggaattacaggtgtgagccactgcacctgacctgagcacctcttcttattgtcccacttatgcctagtgttccattattggaatgctaagcatgtgggagttattcatattctactgctccaggtcattgccaaggtctgattttcaaaattcaaaaaattgaaacctcaggcataaatgggttaaatctcttatagacctcagggcatccatgatttcttagatcatattcttttctacttttctcttgggtcacctgttctttctcttgttattttgcaggaattccttgtattctagatattgtagaaacctttgaatctctcatctgaatgttcatttggtccatggtatcctgtgttacacataattccttaattttcatgcatatttatcctttttctttttgatcttctactttgtcctttcgaggttttaagaattcccacccttaagtcacaaaagtgtttcttctgttatcttctcttaactttatagctttattcatctcatataggaagagattccatcctgtatatgaagtagacaaggatctggtttttttgttcccaaatttccaattgtttgaacatcttcctccaaatcatctatcaattgcccaggggtgtgtgggcccctctttaccagaagttgttaaattttcacctattcctgtgcctgactgcaagctctcttctctcttcctctggtccgttttcctgttcttgtagcagtaccagtcttttcttttcgtttcttttcttttcctttctttccttttccctccttccctccatctttctttctttccttccttctttctttctttccttctttctttctttcttccctccctccttctctctttcttccctccctccttctctctttcttccctccctccttctctctttcttccctccctccttctctctttcttccctccctccttctctctttcttccctccctccttctctctttcttccctccctccttctctctttcttccctccctccttctctctttcttccctccctccttctctctttcttccctccctccttctctctttcttccctccctccttctctctttcttccctccctccttctctctttctccttccttccttccttccttccttcctctctctctctctctcttgctttcttgctttctttcttggttttgctgtgttcccaagctggagtgcagtggtgtgatcatggctcactgcaacctccacctcccaagatcaaggggtcctcccacctcagcctcccgagtagccaggagtaaaggcacatgccaccacacccggctaattttttgtatttttagtagagacaaggtctcactatgttgcccaggctcgttgtgaactcctgggctcaagcagtctgcctgctttggccttccactgtgttcggattacagatgtgagccaccttgcccagcgcatttatcacctttttttttttttttttgacggagtctcagctgggctggtgagcagtggcgtgatctcggctctctgcaacctctgccttccggattcaagtgattctcctgcctcagcctccggagtagctaggattacaggcgcctgccaccacacccagctatgtttttgtatttttagtagggacggggtttcactatgttggccaggctgatcttaactcctgacctcatggctctcccgtggcggcctcccaaagtgctgggattacaagcttgagccaccacccctggccactttatcttttagaaaatattttatttcatttttatgctatacctttgtaatagatcataatatctggtaaattggatttatcttcttcaatcttttattttaattttatcttaactttttttttaagagatgggatctcactttatagcccaggctggagtgcattggcatgatcatagctcactgcagccttgaactcctgggcgcaagggatcctcacacctcagcctcctgagtagctgggaccacagacatgcaccaccaggcctggtggatcttttattcttaaattgacctagcttttgatgaactttaattcttccaattagaataagatggttaagttcctacaaaataaaatgctagattttttattgaattgctttgaatatgttgattaatttagaaagaaatgagacctttataatattaagtcatctcattctagagtgttgaggggattttattgaaacaattttgtaatctttatagagattttcccctcgtctttgttagtatattctattattaatttgagacagggtcttgctctgtcacccaggctggagtgcagtggcatgatctccgctcactgcaaactccacctcccagattcaagtgattcttgtgcctcagcctcttgagtagctgggattacaggtgcatgccaccatacccggttaatttttgtattgttaatagagacggagttttgctatgttggccagggtggtcttgaactcttgacctcaagtaatcaacccgcctcagctttccaaagtgctagaattacaggcataagccacagcacctggcctcattatatattttaaaacattttttaatgcaaataggttaacacttttaaggagaccctctatatgttgtgttttgcttagaaatgcttctaaaaataccatatcaagttttctaatacttttgcgactttggttttctcatgcttaaatccttgattcttctggaattcattttgttattggatttagggtcagagggaggttggaattgcctttgcaaaaattataactgaggacatcatgacagtgaaagagaacagacctaatcgactccatcttgcttgtaaccttcaagctgtctttgttcattcctgggcataggctgaactaactttgggaaggaattcagttcttggtttgagtctgaaaccaaattgataatagccctttcctgaaaacaccccctgtcttgataaatcggctctttctaggcagcaggcaaggtgaattcactgggcggttacaagttggtgcgagggtctctctggactgcaggagggctgtgtttgccccctggataattgttgggtgttaccttagggatgacctggcccagttgcccttcctgaccatgtgcctgaaggagagcctgcggctgcattccccagtctccaggatccaccgctgctgcccccaggacggggtgctcccggatggccgggtcatccccaaaggtgcccacagttgggcaggcggggagggctttgggcagggtggaggtcccatcgtgtagtggagtccttgtcctgactgcacctcctccccgacagggaacacttgcaccatcagcatctttgggatccatcacaacccttcagtctggccggacccggaggtgctaccccttccgccttctccatcccggggcctggtcaggggaggggtcttttcccagggaagcagatactccctctctactccacccacatgtgtactttttttttgttttgttttttgagacgaagttttgctcttgttgcccaggctggagtgcaatggagcgatctcggctcactgcaacctctgcctcccgggttcaagtgattctcctgcctcagcctccctagtagctgggattacaggcatgtgccaccacgcccggctaattttgtatttttagcagagacggggtttctccatgttggtcaggttgatctcgaactcccaacctcaggagtttcgcccctcagcctcccaaagtgctgggattacaggcatgagtcaccgtgcccggcttcacatctgtcttatatgcgggtggctgggtgtcctgagagacccccacccaacagccctaacttgcccacccaccaggtctatgacccctttcgcttcgacccagaaaatctccagaagacatcacctctggcttttattcccttctcagcagtgcccaggtgaggctaaggggcttctgaggcgggcatcgggtgagggtgccacaggtggaggcaaggtctgacttgtggggccacgtgtttcagggagtcgagggttttaataagatcccaggaaaagggggtgtgtgttctcagacttccccactcctacgtctgctggtctgggggctggagtctaagccaggctcggaggatatgcaagcccacatgggggtcccaggcacagagtccctctctctgcccctcaatcggatctgggtggggttgggagtcccagacgaggttcccggcgcgatggggccgggatgggggtcctgggcacagtcagagtccccaccccctcccccgggaactgcatcggccagacgttcgccatggctgagatgaaggtggtcctggcgctcacgctgctgcgcttccgcgtcctgccggaccacgcggagccccgcaggaagctggagctgatcgtgcgcgcggaggatggactttggctacgggtggagcccctgagcgcggatctgcagtgacccaccactgtcaggtctcagagccacccgcgccctcctcaggcacctttgcagattccggggaatcaatctgtgcctgagtcccacagacagccagcagggggcgtcggagaactgcagggatccagggcctggcgaggggaaggcggagtatttctgagccaagaccctgacagcctctctggttgagcacagtggccccgtgctgagggcgggttgtcccagagcgcaggtggggacagtatcctgtgggcgatagggagccatggcgggtgtttgagcaggagagggaccagggttgaggaggcacctatggggcaggtttgaggctctgagtcactgaggaaaaccagagcggcactacatccccgcccctcgatctcaattctcatctcctaatacatccagttgttttttttcctctcacctcagggttcttcaccgttttcattgttcttaaacgactgcacttattaaacaataataagcctggttgttttacagtgtgtctgatcattgaaagtacctgtatctattacaatgactgtcatttttgtcatggggtcagtgtttcggttatctttgcctggtattggctgccatatttgcatattagaaataatattcgtaggatttaaagaaggcagagttctctctctcttttttttttttctgaaacagagtcttgctctgtcacccaggctggagtgcagtggcaagatctcggttcactgcaacctctgctcctgggttcaagcgattctcctgcctcagcctcccaagtagctgggactacaggtgactgccgccacccccggctaattttttttttctttttttttgagacggaatctcactctgtcgccctcgctggagtgcagtggcgtgatctcggctcactgcaagttctgcctcccgggttcacgccattttcctgcctcagcctcccgagtagctgggactacaggcgcccgccaccacgcccggctaattttttgcatttttagtagagacggggtttcaccatgttggccaggctggcctcgaactcctgacctcaagtgatccgcctgccttggcctctgaaagtgctgggattaacaggcgtgagccactgtgctcagccagaagaaggcagctttgtctagggagcagtctttggaggactgctggttgaggtttatgttcatgaccctctaggcttgtggtgaccaaggtcacccaggaggtttaaatttaagctgaaatcacacttgcaagctgttttgctttatttttttctcactctgagagatgtagccctttgaggtctccacatatgcaaggaggggatttttaccattttccctccttgtatcacacctaggcttagaattttttttttcctgcaatcacaaaaccgttaaaagagtttcaaattttcctgatttgagaagtgccttcagagagaaggtatagtttatattcactttatctctaggtttctgttattatttgaatcatgtttttgtgatttttcactcttctttttttaaaaaaattattttattttaagttctgggatacatgtgcaggacgtgcaggtttgttacataggtaaatgtgtgccatggtgatttgctgcaatgtgactgcagcaatgtgatttgctgcatggtgatacctacccatcacctaggtattcagccccacatccattagctgtttgtcctgatgctctccctcctcctgcccccaccacaggccccagtgtgtgttgtacccctccctgtgtccatgtgttctcattgttcagctctcacttatgagtgagaacatgcagtgtttggttttctgttcctgtgttagtttgctgaggataatggcttccagctccatccatgtccctgcaaaggacctggtcttgttcctttttatggctgcataatactccatggtgtatatgtaccacatttcctttaaccagtctatcactgatgggcatttgggttgattacatgtcttcgctattgtttcactgtcttttcatgtcatttatttatatgaagaattgaagaagcatctaccttttttttttttctttttttgagacagagtctcattccattgcccaggctggagtgcagtggcttgatctcggctcactgcaacctccacctcccggattcaagtgattctcctgcctcagcctcctgagtagctgggattccaggctcctgccaccatgcctggctaatttttgtatttttagtagagatggggtttcaccatgttggccaggctggtctcgaactcctgacctgaagtgatccgcccaccccagcctcccaaagtgctggggctacaggcgtgagccaccacacccagctgcatccagctttttaaaaatgctggaattttgatccaaataacttagtttgctattaatggaagcaacaagtgtaaaacagaatgttaaattgtcatgatccagtgattgctccactctgggatgcgttagaactgataattgctattaaatttatagatttccacaccacacaagcccacatcaaaatgtgaagcagagtaccgcacatcaaggccgagtgcagtggctcattcctgtaatcccagcactttgggaggccgaggtgggtggatcacttcagatcaggagttggagaccagcccgaccaacatagcgaaaccccatctctactaaaaatgcaaaaatttgctgggcatggtggcacgtgcctgtagttccagctacttgggaggctgaggcagtagaattgcttgaacctgggaggtggagattacagcgagctgagactataccactgcactccagcctgggcaacagagcgagactctatctcaaaaaaaaaaaaattaaaaaaagaactgcacatcacccagaaatcctggactttgagctggcaggagggagcagatggaatttggatttgatttggcctcttgattgatctctgttttcagaacagaccccacggtcacgttccagctcctctcactctgctaatgtctttcattactgccaccatctgacttgcacttatgcaacccaactcttccccttctggagccaccttcctcttgctccctttcactaagatgtcccaacgggccatgttgcccaacccggataaaaggtggccgctcacttcccctttcagaagccgactcttgtccgtttctctccaccataccctgccctctgacttaggcctgctcttacctttgggggatgcggcctcggtgtgttcatttgtaaatggcaagattgatgggcctgttcacaagggcagtgggatggtgcacaggacacactagtacagagcctggtgcagaagctgctcccaggtgggagccaccatcctgatggacagttagggtcacctctgctcctctgcaggctgctgagaagggaaggttcctatgtatagacccttttccatgagaggaactgaagcccgggtggaccagccagaacatgaaaggatttggggaccagccctagcgcatatcctgaggccacactgctgcccacaaactgcccttgtggagcccactccatatgactctccatgggctggaaccactctcaggaaaagaatacatttcctctcaagccaaaacagacctctctgttggcagacagtgtgtcttctccctctgccctggaatgcacccttggggcttggagatgtccctgatacagaaggaacaggaggaagcagagcttccctttatccatgcagaatctagacactgtttactgctgaggctgcaccacagccagaggctgcaggcagacctgcgatcttagggttctccttagaatcagaatcaatagaatatatctctatctatgtttgtatctatccatctatctggaaagggaggtagagtgaatagggaatttattacaggaatcgtctcttgtgattagggaggctgagaagttctacaagatgctctctgtaagctggagaactagggatgcctggtggggtagctgcatctgagtccaaaggcctgagaacctggagttctcatgtccaagggcaggagaagatggatgtcccagctccagaacagagagcaaattcaccctctgcctttagatctatccatggagttgcagcaaactccttcaaagagtgacttatctttgcagagtcaaaggttgttttttttttttttttttttttgagacggagtcttgctctgtcaaccaggctggagtgcagcggcgcgatctcggctcactgcaagctccgcctcctgggttcacgccattctcctgcctcagccttccgagcagccgggactacaggcgcccgccaccacgcccggctaattttttgtattttttcgtagagatggggtttcaccgtgttaaccaggatagtctcgatctcctaacctcgtgatctagcagcctcggcctcccaaagtgctgggattacaggcgtgagccaccgcggccggccagtcaaaggtttcttttcccactccacctaggctttcagcttcctctaaggggagtgatggtttatgaaagagagagtgagtggggaggcagagggccagtgggcctctaggattctgctacacctgtgtatgtaattctagaaacattctcagggctgtgcgcagtggctcacacctgtaatccaaggactttgggaggccaaggcgggtggatcacgaggtcaggagttcgagaccagctcatccaacatggtgaaaccccgtctctactaaaaaatacaaaaattagccaggcgtggtggtgcacgcctgtagtcccagctactcgggaggctgaagcaggagaatcgcttgaacctgggtggcggaggttgcagtgagccgagatcctgttactgcactccaggctggcaacagagtgaaactccacctaaaaaaaataaaaataaaaataaataacaacaacgacaacaacaacaacagcaacaacaaaacgtactcaggcctgctcaggcctggtcttgtcatcggttgctgtggggcctccttcctctcttgaatgtgaaggaggcaccactggacagtttggggagaacagactcccaggtgtctggattattagtttgtctctgtgtttgtttgtgtgtgtgtgacagagagagagagagagagaggatgtgtgtgggtgtgcgattgtaggtgtgtgtgtgactgtatctgtgggactgcattcacagcgtgtgcaagtgtgtttgtgagtgtatgtaattgtgtgcatgggtggctgtgatcacatgtgcatatgtctgtattacaccgtgttggcgactgagtgtctgagtgtggtatgcatgtgtgagtgtgtgtatgttgttgtcactgagccactgtagctgtctacaccaggctgtgttcctattcatgactggagccactatcacagccactgtccttgaccccaggcctgacccttgcagtgcaggcagcacattctcatgcccttgaccccacatctgacccttgcaatacaggcaacacattctcatgcccttgaccttacatctggcccttgcagtgcaggcagcacattttcatgcccttgatcccatgtctgacccttgcagtgcaggcagcacattctcatgtccttggaagcagccctcaacaatgggtggtgagtattggtgggtaaatgccccagctccttttccctgagtgggatgactctgaggtgcatgttctatgctgtctcccagaggtgccatggagggctgagccttggctgcccatggtggaaactattttaaataagttccttttaattgctacatttcctttcctgtctcagttttcagctgtcctactggtgtttcctggacttacctcccaaacaaacaactggcagttgaaatttggtcacctctaaataaattatttgcacttgaatccttgcatcagggtctacttccaggaaacccaaactaagacaagcatgtctgctggcttctcccatctcaataggcttatcactgtgtcctttgtactgaagaggaacatgagattcagagaagacaagtcacttgcccaaagtcacacagctgattagtggcaggtccaggtttgaccatgggccacctaatcccaagcttggtgcttgctcctctcctgagagactccaccctactaaaggccagcggaaacaacataggaagttcgaagccatcaagggctttgctgcatgtgccagagggaaccaaggctcatagctggtgtctgtgtccttgtcctgtcattagagtaataatggcatgcacatgcttgtggctgattatgtgccagggaatgttgttgtaagcactttactcttttaaactcccttaattttcacaacaaccttgctatgactcctggttttcaggcaagaaaactgaggcacagagaaataaagagactggcccaaattcacacagctggttgagagttgaacgaagcagcctgcacctggagtccctgttcttcaccacgacactctctggcttctcacaagtcatatagatggagttctactaaatgtcaggcacgatgctaagcaatttcttttttgtttttgtttttgagacagtgtctcgctctgtcacctaggctggagtgcagtggtgcaatcttggcttactgcatcctccgcttcctgtgttcaagtgattctcctgcctctgcctcccaagtagtggtgattacgggcatgctccaccacccctggtgaagttttgtatttttagtagagatggggtttcaccatgttggccaggctggtctcgaactcctgacctcaggtcatccatctgcctcggcctcccaaagtgctgggattacaggcgtgagccaccgtacccgaccagcaatttcttttaaaatataatttgtaattatatatattagtaattataattaaacatgctgtacaacctcatataataaaaggaaacaattgctaagtgtaagcattgagaacaagaattctcccttcaaccccctgctcccattccgacagctgggagaatgcttatgatgtgcttatgtaaacttcagcacccacataactggtgtgttgagaggtcccatctttttggggaacgtaacactcgggtcctggcagggaacccacaggggctaaaggagggggtttaaggaggagccgtttgcaaaggtgtgggcagggccaaggggaaccatgagggatggtgcagcaccctggaggttaccatccaccgagagctgtcaccactcccaggctggtggtgccaggaaacagctgctcctggaaccaagatctgtggctgaaagaggagggcagaggacagacctcattctgctctccccactgatcatcagtggatctcccattgaccaaactgccatctgcttatatgactggagaggctgcaggcaggtgtccaaagcctcctgttgtggttcattcctgacaacgggtcagtgctggtccccccgatcccacagactgagatccactcagcttctctgccttgggtggcccccttgttcactgactaggcaggcacttgaatgaggaacaatattctgtctctccctgtactctcctcttttccctgtcacagggagggtctctgttgttcatgtcctgagtccctccatctagggctggtggctggtgttacaggaccaccaggttcatatccctgctgtgcaataacagaaaatacactgagacagaagtgtttgcagcagagaaaaagtttaatgatcacagggtggccgagctgggagacggaaggaactctcaaatacatctcccccaggagttctgggctggagtttttaaggactccatggaggatgagggattagaaaatgggggtcactgattggttgaagaaaggaggatgaaatcatcaagatgtggaaacttccttctttggtgagtgagcccctcatggggggctggctatgattcatgacctttattgtggtaaatggcactcaggaagcactttggcttgactatcaggccaaattttatcagcaccacgggcaagtttgcaggacgactcgttcctgtttaccccatgcaccccaagggaaattgctgaagtttctgtttatcttggtacaactaaagaaggatgcaagaatggacaaacttttttggccactcatttactcctcccgctgctgggtctttacacacctggcatgatttcatgggctggttcttatccacaggtgactcttccacatcactcaggtttctgctcgaaggtcacctcctgggggccccctgcctgatcaccgtgtccagaacagcccccttggtccctttctatctattcctgcagattaactgatgtcagtagtttccctgatatgcaaaacctgaaagaatatctcaaatggagaactcacatttcacaatgcttgagacgctgtctctagggcagttgaagaagtctataattttgtgacagggtctatgtgattctaaggcaagaagcagcaaacagctatgagggagcagtcagagaacaagctgacgtaatgattaatgctgaatgtgctgcagacttggttcattttttttcctcctcccttcttccatgattaattttataaagtgtataggtgatatggttgggctgtgtccccacccaaatctcctcttgtagttcccacaatccgcatgtgtcgtggaaggtacccgggaggtaatttaatcatgggggtggttactctcatgccgttctcatgatagtgggtaagttctcacaagatctgatggttttataaggggcttttcccccttttgcttggcacttctcgttgctgctgccatgtgaagaaggacatgtttgcttccccttccaccatgattgtacgttttctgaggcctccccagccttgtggaactgtgagtcaattaaaactttttccttattaaattaccctgtgtctttattagcagcatgaaaacagactaatacaatagggatgggtcactggtgagggtgctggggtcagctgttcaggaccagcaccacccaatagatcccacccatgaggggttgataccaactcttatgggtcatctggacttttctgaaactttcctggggctgtttttctccagctcatctgatctcctgttgcctctggcaaggtgctagccagtcagtctagctctggacatgccttgggaggctggctatgattcatgacctttattgtggtaaatggcactcaggaagcactttggcttgactatcgggccaaattttatcagcaccacgggcaagtttgcaggacgactcgttcctgtttaccccatgcaccccaagggaaattgctgaagtttctgtttatcttggtacaactaaagaaggatgcaagaatggacaaactttttggccactcatttactcctcctggtgctgggtctttacacacctggcatgatttcatgggctggttcttatccacaggtgactcttccacgtcactcaggtttctgctcaaaggtcacctcctgggggtcccctgcctgatcaccgtgtccagaacggcccccttggtccctttctatctcatctcactcttgtaatttctttcatcaccgtcaccattggatttggtcttatgatctgttggcttcctccatcagacaggaacaccaggttggcagtgttgactgaaattaaggctttgaggcagaaataattcaataaaggtttattggaagtcaaatgtgaggattgattgaggaagacacagtaatgaaattgagcatgctttaaagccttttataaattggaatgtttttgtgagaaggtttaggagaagggaggggaactcaaacaggagttgtatgtttttctttcccttccttctttccttcctttcttcctttctctctctctttttctttctttctttctttcttgttttgagacagggtctcactctgtcacccaggctggagtgcaatggcacaatcacagctcactgaagcctcaacctcctgggctcaagcgatcctcttgcctcagcctcccaagtagctaggaccacaggtgtgcaccaccaagcaaggttaattatttttttttgtagagacaggatctccttttgtttctcaggctggtctcaaactcctgggctcaagcaatcctcccacctcagcctcccaaaatgctgggattacaggcatgagccactgtgcctagctggagttgtctttttcattgcagggtataatatagagattataattattggctacaaatgacaacatataggctagaacattaatatatgtaaaacaatctgtacaactttatgatttagaaacaaatttgtgtctttttcaatgtcagtaggttacatattaagcatgtcgacagtttgaggaactcaggataaaatttgaggctggctatgattcatgacctttattgtggtaaatggcactgagtaagcacttggcttgactatcaggccaaattttatcagcaccacgggtaggtgtgcaggacggctggttctgccatgcattatttttcattcagggacaggaggtaaacgacgaatcataagatcttcctgggacggttactttggaagcctgccaaaggtgacttgtagattattagttctttggatagagaatcttttcaaggaagcagtgatgaccaatctctgttcaggttagagtaacaggggttatttatctttcgccattgggaaggctcatttgtaagaagtcatgtctttccaggctgaggagataaataattttgttattgcaggcaggtgaaattgttagtgacatggggcaggtcatgacttgaggctctgtgttttcttttgaattgcgagtcatatctagttgttgggcaaccattattttggtgttagctgttgatgaatagttttaaaattctagagaatttaggtagagagaaaggtaaatgttttaattttgtttataaaattgtgttttatccatttgttgtaagacatacatagtttaaaagaaaaaaatttttttattttggaaaacaatataaaaataattagcattgtgttaaatagaagctcatataaatcataaggaatggtaccagttcctccttgtacctctggtagaattcagctgtgaatccatctggtcctggactctttttggttggtaagctattgattattgccacaatttcagagcctgttatgggtctattcagagattcaacttcttactggtttagtcttgggagggtgtatgtgtcgaggaatttatccatttcttctagattttctaatttatttgcgtagaggtgtttgtagtattctctgatggtagtttgtatttctgtgggatcggtggtgatatcccctttatcattttttattgcgcctatttgattcttctctctttttttctttattagtcttgctagcggtctatcaattttgttgatcctttcaaaaaaccagcgcctggattcattaattttttgaagggttttttgtgtctctatttccttcagttctgctctgattttagttacctcttgccttctgctagcttttgaatgtgtttgctcttgcttttctagttcttttaattgtgatgttaaggtgtcaattttggatctttcctgctttctcttgtgggcatttagtgctataaatttccctctacacacttctttgaatgtgtcccagagattctggtatgttgtgtctttgttctcgttggtttcaaagaacatctttatttctgccttcatttcgttatgtacccagtagtcattcaggagcaggttgttcagtttccatgtagttgagcggttttgagtgagcttcttaaccctgagttctagtttgattgcactgtggtctgagagacagtttgttataatttctgttcttttacatttgctgaggagagctttacttccaactatgtggtcaattttggaataggtgtggtaaggtgctgaaaaaaacgtatattctgctgatttggggtggagagttctgtagatgtctattaggtccgcttggtgcagagctgagttcaattcctgggtatacttgttaactttctgtctcgttgatctgtctccaatccatagaaaaagagggaatcctccctaactcattttatgaggccagcatcatcctgataccaaagccgggcagagacacaacaaaaaaagagaattttagaccaatatccttgttgaacattgctgcaaaaatcctcaataaaatactggcaaaccgaatccagcagcatatcaaaaagcttatccaccatgatcaagtgggcttcatccctggaatgcaaggctggttcaatatactcaaatcaataaatgtaatccagcatataaacagaaccaaagaccaaaaccacatgattatctcaatagatgcagaaaaggcctttgacaaaattcaacaaccttcatgctagaaactctcaataaattaggcaatgatgggacatatctcaaaataataagagctatctatgacaaacccacagccaatatcatactgaatgggcaaaaactggaagcattccctttgaaaactggcacaagacagggatgccctctctcaccactcctattcaacatagtgttggaagttctggccagggcaattaggcagaagaaggaaataaagggtattcaattaggaaaagaggaagtcaaattgtccctgtttgcagatgacatgattgtatatctagaaaaccccatcgtctcagccccaaatctccttaagctgataagcaacttcagcaaagtctcaggatacaaaatcaatggacaaaaatcacaagcattcttatacaccaataacagaccaacagagagccaaatcatgagtgaactcccattcacaactgcttcaaagagaatgaaatacctaggaatccaacttacaagggatgtgaaggacctcttcaaggagaactacaaaccactgctcaatgaaataaaagaggatacaaacaaatggaagaacattccatgctcatgggtaggaagaatcaatatcatgaaaatggccatactgcccaaggtaatttatagattcaatgccatccccatcaagctaccaatgactttcttcacagaattggaaaaaactactttaaagttcatatgcaaccaaaaaagagcccacattgccaagtcaatcctaagccaaaagaacaaagctggaggcaccatgctacctgacttcaaactatactacaaggctacagtaaccaaaacagcatggtactggtaccaaaacagagatatagatcaatggaacagaacagagccctcagaaataacgccgcatatctacaactagctaatctttgacaaacctgagaaaaacaagcaatggggaaaggattccctatttaataaatggtgctgggaaaagtggctagccatatgtagaaagctgaaactggatcccttccttataccttatacaaaaattaattcaagatggattaaacgttagacctaaaaaccataaaaaccctagaagaaaacctaggcattaccattcaagacataggcatgggcaaggacttcatgtctaaaacaccaaaagcaatggcaacaaaagccagaattgacaaatgggatctaattaaactaaagagcttctgcacagcaaaagaaactaccatcagagtgaacaggcaacctacaaaatgggagaaaattttcgcaacctactaatctgacaaagggctaatatgcagaatctacaatgaactgaaacaaatttacaagaaaaaaacaaacaaccccatcaaaaagtgggtgaaggacatgaacagacacttctcaaaagaagacatttatgcagccaaaaacacatgaaaaaaatgctcaccatcactggccatcagagaaatgcaaatcaaaaccacaatgagatatcatctcacaccagttagaatggcaatcattaaaacaacagttgctggagaggatgtggagaaataagaacacttttacactgttggtgggactgtaaactagttcaaccattgtggaagtcagtgtggtgattcctcagggatctagaactagaaataccatttgacccagccatcccattactgggtatatacccaaaggactataaatcatcctgctataaagacacatgcacacatatgtttattgcggcactattcacaatagcaaagacttggaaccaacccaaatgtccaacaatgatagactggattaagaaaatgtggcacatatacaccatggaatactatgcagccataaaaaatgatgagttcatgtcctttgtagggacatggatgaaattggaaatcatcattctcagtaaactatcgtaaggacaaaaaaccaaacaccgcatgttctcactcataggtgggaattgaacaatgagaacacagggacacaggaaggggaacatcacactctgggggctgttgtggggtggggggagggggagggatagctttaggagatatacctaatgctaaatgacaagttaatgggtgcagcacaccagcatggcacatgtatacatatgtaactaacctgcacattgtgcacatgtaccctaaaacttaaagtataataataataaaatttaaaaaaaggtcaggaaacaacaacaataacaacaacaacaacaacaacaacaaaaagaaggtcatataaatcattttagtcttttatcatttcggtctcctataatttttattgtgtttgatgttggattaataatctttatgcataagtttttattggagttttgaacgtttttatttagtctatagatcattaaattattggaaatctgtgttgtagagtcttttataagaaaagtaattttggactgggtgcagtgactcatgcctgtaatcccagcactttgggaggccaaggcggatggatcaattcaggccaggagttccagaccagcctggccaacatggtgaaaccccgtctctactaaaaatacaaaaattagccatgggtggtggtgtgcatctgtagtccgagctactagggaggctgaggcaggagaatcacttgaacctgggaggtggaggttgcagtgatcatgccactgtactccagcctgggaaacagaatgagactctgtctcaaaaaaaaaaaaaaaaaaaaaaaagtaattttatactagagttggttgcaaatgtttttgggccaggcatggtggctcatgcctgtaatcccggcattttgggaggccaaggcggatggatcacctgaggtcaggagtttgagactagcctgggccacatggcaaaaccccatctctacgaaaaatacaaaaattagctgggcatggtggcggggacctgtactcccagctacttgggaggctgaggtaggagaatcgcttgaacctggaaggtggaggttgcagtgagctgagatttcgccactgcactccagcctgggcgacagagtgagtgagactccttctccaaaaaaaaaaaaaaaaaaagataatgaccagaattatcatgggcagcagcatcacatcagaatcatcagacttttataaattttatataatctttaggatatttatatttataacatttatataaatctaattttagaaaggattaacataattaaaattatgactgcaaatatattagatatttataaatttaaataatttttggaacatttatatcaataacatatttataaacatgactgaaggatctagtattatttatcatttgacaacatttttaatataatttttcaaatctaattatttaatctataaagacttattttaggattttgatcttggagaaacctgtaaaagatataaaaagatctaaacaccttgtcaaattagaatcataggccaggcatgggggctcacatctgcaataccagcactttaggaggccaaggcgggtgggtcgtttgagctgaggagtttaagaccagcctgggcaacatggtgaaacaccatctttacaaaaaatacaaaaattagctgggtgtggtagtgcacaccagtagtcccagctactcaggaggctgaggtgggaggattgcttgagcccaggaggttgaggttgcagggagccaagattgtgccactgcactcccgcctgggcgacagaacgagactccgtctcaaaaaaaaaaaacaaaacaaaaaaaacaaaacaaaacaaattaaaatcacaggtctttgtaaaataatatttatttaactagagtgatgatcaaaagactttacaagcaatagagaaaattatatggacgtgaaaatcttaactgttttattttattaatttatttttgagacagggttttgttctgtcacccaggctggagtgcagtggtgcgaccatagctcactgtagccttgaccttctgggctcaatctatcccactgcttcagcttcctgagtagctgggactacagatttacttccccacacccagcttttttttgtttgttttggagagacggggtttccctatgttgcccaggctaatcttgaactcttgagctcaagcaatccacctgcctcggcctcccagggtgctaggattataggcgtgaggcaccaggcctgtcctaactcttttgcagcttagtcttagtaagtaattaaaaatctgataaagataacacagaaattatttcaataacatgtaaactttttgtttttaaggccaatgaccaaaatgtaaagacaaacctcttgtagtgtgattgtggttttttttttgagacagaattttgctctgtcacccaggctggagtgcagtggcaccatcttggctcactgcaacctctgcctcccgggttcaagtgattctcccgcctcagcctccctagtaactgagattacaggcatgtgctaccacatcaggctaatttgtttttgtatttttagtagagatggggtttcaccaagttggccaggctagtctggaactcccgacctcagatgatccacccaccttggcctcccaaagtgctggaattacaggtgtgagccactgcgcctggcctgaatttttatttttagtaaccttaaattttagtggaaacttagaaagtaagatcttgagttgtctgtcacaaattagtatgttaaagagatgagctactttataatgtttagaaacatgtttttttataatataattttttcttttctttaacttttattttaggttcaggcgtacatgtgcaggtttgttacacaggtaaatggcacattgcaggagtttggtgtacagattatttgatcactaaggtaatacacatagtacccagttggtagtttttggtcctcaccttgcttcccaccctccaccctcaagtaggccttggtgtcgttgttcccttctttgtgtttatatgtcctcaatgtttagcttttatttataagtgagaacacacagtatttgcttttctgttcctgtgttagtttgcttaggataatggcctccagttccatccttgttgttgcaaaggacatggtctcattctttttttatggctgcatagtattccatggtgtatatgtaccacatgttcttgatccagttgatggacatttaggttgattccatgtatttgctattgtgactagtgctgcaatgaacatacatgtgcatgtgtctctatggtagaacaatttctattcctttgggtatatacccaataatgggattgctgggtcaaatggtaattctgttttaagtcctttgagaaattgtcaaactgcttcccacaatgcctgaactaatttacatccccacaagcagtgtataagcatttccttttctccataacctctccagcatgttattactatatatataatttttactttttaatcatagtcattctgactggtgtgagatggtatctcattgtggttttgatttgcatttctctaatgattagtgatgttgagcattttgttgtatgctttttggatacgtgtatgtcttcttttgaaaactgtctgttcttatcttttgcctacttttttaatgaggttgcttggtttttccttgtaaatttaagtttcttatagattcttggtattagacctttgtcagatgcatagtttgcaaatattttctcccattctgtaggttgtctgtttactttgttgatggcttattttgctgtgcagaagctctttagtttaattaggtctcatttgttgatttttgtttttgctttgttacaattgcttttggcgtcttcatcatgaaatctttgcagtcctatttccagaatggcatatcctaggttatctttcagagtttttatagtttttggttttacagttaagtccttaatccatcttgggttaatttttgtgtatggtataaggaaggggtccagtttcagtcttctgcatatggctagccagttatctcaacaccacttattgaatagagagtcctttttccattgcttgttttgtcagctttgtcaaagatcagatggttgtaggtgtgtgaacttgtttcttggctctctattctgttccattggtctataggtttgtatttgtaccagtaccatgctgttttggttactgtagccctgtagtatagttgggtaatgtgatgcttccagctttgttctttttgcttaggattgccttggctgctcaggctatattttgtttccatatgaattttaaaatagttttttctaattctgtgaaaaatgtcattggtagtttgataggaatagcattgaatttgtaaattgctttgagcagtatggccattttaacaatattgattcttcatattcatgaacatggcatgtttttccatttgcttgtgtcatttctgatttctttgagcagtgttttgtaactctagttgtagaggtctttcacctccttgcttaacagtattcttagttattgggccaggcgcggtggctcatgcctgtaatcccagcactttgggaggccgaggcaggcggatcacgaggtcaggaaatcgagactatgctggctaacacggtgaaaccctgtctctactaaaaatacaaaaaattagctgggtgtggtggcgagcgcctatagtcccagctactcgggaggctgaggcaggagaatggtgtgaacctgggaggcggagcttgcagtaaacctagatcgcaccactacgctccagcctgggtgacagagcgagactctgtctcaaaaacaaaaacaaaaaaacggcattcttagttattttattcttttgtggctattgtgaatggggttgcattcttgatctggctctcagcttggacataattttttcttaattagaaatgacccagatgtttaatgagtatctattatttaatttaacataactttaagattttgaattacacaaaaagtttttaataagcatttatctcatttatgcttacccaatttatttatttttaataggttgactagactatttatgaaaacttagatattagacaaagttagtcattatcaaaagttatgtatggttatgttaaacatttttatagcctgtgattatcaggtgttcacccgagtgagaaacttaaattaaaatatgggtattttgtcaacaactcagaagatttagctgtttttattaagctaacaatattaaatgtcttatttattaaaattgcacaaacaaagatcatttggttttgaccagatttatagtcttataacctttgtgtcaaacccaggcaccttaaaatatctagtggagagaaatacaaaactttctgaccagtaaactcagacaaaaatgtacgttgacaattttaaagacatttaaatgtttatcttatcaataatttgaacatcaacttatttattaaagacttctttaagtcatataaacttggaacatacttgggtttagtaatttatgagcactcatctatttataagtcagttttgtagcatatagatacaacatataacaatatatgtacatatatttaaacacatctaaacaaacatatacacacacataaagactttatagtatttattttagaattttagtcatgagagagtagcataaacttactagtttataaaagacagttggatccatattacagatgacaaaattggaacttgtttacatggcttaaactttgtctcaacagataacttaatgaaggctgtggatcaaaattttgggtaaagcaattcttatggcagtttgattttaaaaacatcttctgccccttttttctttagttctaaatgatcttagggttaacattttaatgtttatattttagttagaactgtctgaattgtcaaaaacacacacacacacaaaatctctaagtaattttgcattagcaataccataaacagtgagctttatctcaataccagtagaaaagttagcagatttaaagtgggcagaaaaaaaaacagagaacttagaaggctctgtgtgctaactctaaagttataagttgaccatctgagctctgaattccttttctttttctttttttcagaaggagtcttgctctgtcacccaggctggagtgcagtggcacgatctcggcttactgcaacgtccgcctcctgggatcaagtgatactcctgcctcagcttctcaagtagctgggactacaggtgtgtaccaccacacccagctaatttgtgtatttttattagagatggagtttcgccaagttggccaggctggtttcaaactcctgacctcaagtgatccgcccgcctcgtcctcccaaagtcctgtgattacaggcttcagccacctcgcccggccctgaattgttttagtgtaatctgtccatcaatttaaaatgtacagaagaaccagccatgatacatagccagctgtagtctcaaaaaaacctggcatatattaatgtttgagaattttattttgtttcttaatctcccagtttagaaaaaaatttttggatctgcattttttaatcttaagtttcattttctttttgtagttgttccatttgctcttttcgttttacatttatatatattttccccttttgagggaaggaaatgtgtgcattgtgaactcctaaaaatctctgcctaagagatatatgggagctgagtgaacaaggaaaaagggatgaactcatattgtttccggaaccaaactgggtctggctgcgttttcttgaggcccgataaggagaagcagacaaactaggaaagaaaggaatttattactgtaaccagacacagggagaaggccagagataattcaaacagaccaactcaaagagttacaattttcttagtgcttacataggttggggttatgtgcctatgtgccgtatatcattcgccttaagtctactggtaactaattttgtttcaactagaaggtcagaggcaaaaaatgctgtctaagtctgattaaaagggtcctagtaccttcaaggcctgtctactgtggtactggagtgactatttctttttctttctttcttttcttttctttttttttttgagacggagtctcactctgtcgcccaggctggagtgcagtggcacaatctcggctcactgcaacctctgcctcctgcgttctagtgattctcctgcctctgcctcctgggtagctgggattacaggcgtgtgccaccatgcctggctaattttgtatttttagtagagatgggggtttcaccatgttggccaggctggttttaaactcctgacctccggtgatctgcctgcctcagcctcccaaaatgctgggattacaggtgtgagtcatcgcgcctggcctggagtgattatttctatcttatctcctttacagcttgacccagagagctgccttagactctccaatgaatctattcaaacagctgcctctgttaccttgacttgtctcagattttgttacccgagatgggtcctggcactaggaatgtaagactgtctctattattttgacttgttccaggttagggagaagcctgtgcaaggctcctactgaccatatgtttcatttctagcttttatgtctgggcacctatttccctagtttggactatttgctcaatttttaaggcagctctgtggaaatctgtttgtgtaacacaagtgctatgcaggcctgtctgtgtgactgtcatgtaggcctggttgtgtggttgtcagggagaactctactgccacaatagcacacggggtaagaggaggggaaacagttggaggtttagaagcttctaagtcccactgaaagtctctcatttaatttttccggttctaagactagcaacttttttttttctttcctgaggggtgtctcgctctatcgcccaggctggagtgcagtggcgctacctcggcttactgcaagctctgcctcctgggttcaggtttacgccattctcctgcctcagcctccggagcagctgggactacaggcacctgccaccacgcgcggctaatttttttttgtatttttagtagagacagggtttcacagtgttagccaggttggtctcgatctcctgacctcataatcctcccgcctcggcctcccaaagtgtgggattacaggtgtgagccaccgcacccagccaagactagcatcttttttaattgcccacacaaataaatcacttaaggcatttcaaaaagatctccatttcagctattgttgcttataaccatcgtgggttaggcaggaccacttacctcagcacttgtaaatatgaagacttttaaaaataacttttcatggctgggtgcagttgtgtctggaattggtgggttcttggtctcactgacttcaagaatgaagccgcggaccctcgtggtgagtgctacagctcttaagggggcgcgtctggagtttgtcccttctgatgttcagctgtgtttggagtttcttccttctggtgggttcgtggtctcgctggctcaggagtgaagctgcagaccttcgcagtgagtgttacagctcttaaggcagtgcgtctggagttgttccttcctcccagtgggctcgtggtctcgctggcttcaggagtgaagctgcagacctttgcggtgagtgtcacagctcataaaagcagtgtggacccaaagagccagcagtagcaagatttattgcaaagagcaaaagaacaaagcttccacagtgtggaaggggacctgagtgggttgccactgctggctcctgcagcctgcttttattctcttatctggccccacccacatcctgctgattggtagagcccagtggtctgttttgacagggcgctgattggtgtgtttacaatccctgagatagatacaaagttctccacgtccccatcagattagttagatacagagtaaggacacaaaggttctccaaggccccaccagagcagctagatacaaagtgtccatggtgcattcacaaaccctgagctagacacagggtgctgactggtgtgtttacaaaccttgagctagatacagagtgccgattggtgtatttacaatccctgagctagacataaaggttccccacagccccaccagagcagctagatacagagtgtcgattggtggattcacaaaccctgagctagacacagggtgctgattggtgtttacaaaccttgagctagatacagagtgccgattggtgtatttacaatccctgagctagacataaaggttctccaaggccccaccagcctcagaagcccagctggcttcacccagtggatcccgcagcagggctgcaggtggagctgcctgccagtcccgcgccatgtgctcgcactcctcagcccttgggtggtcatgggactgggcgccctggagcagggggcggcgctcgtcggggaggctcgggctgcacaggaacccacggagacgggggaaggctcaggcatggcgtgctgcagtcccgaggcctgccccgcgggaaggcagctaaggcctggtgagaaattgagcgcagaaccggtgggctggcactactgggggacctagtacaccctacgcagctgctggcccgggtgctaagtccctcattgcccggggccagcagggccggctggctgctcccagtgcggggcccgccaagcccacgcccacccggaactccagctggcctgcaagcgccccgcgcagccccggttcccgctcgcgcctctctctccacacctccctgcaagctgagggagtgggctccggccttggccagcccagaaaggggctcccacagtgcagcggtgggctgaagggctcctcaagtgccgccaaagtgggagcccaggcagaggaggcgccgagagcgagtgagggctgttgggactgccagcacgctgtcacctctcgcagtggctcatgtctgtaatcccagcactttgggaagccgagggaggcggatcacctgaggtcaggagttcgtgagcagcctggccaacatggtgaaaccctgtctctactaaaaatacaaacaacaacaacaacaacaaaaaactagctgggcgtgatggtgggcatctgtagtcccaggtactcgggaggctgggatgctgaggctggagaatcgcttgaaccctggaggtggaggttgcagtgagctgagattacgtcattgcactccagcctggctgacaagcgcgaaactccgtctcaaaacaaacaaacaaacaaacaactttctccataacttttatgtataaacactggctgatgtacagtcagtcttaacaggacccatttcccatcctggttgttttgagtgagacaagctatgttgtggagcaagagtgccctaatgtgatcaaaaaatgataaaacgaaggaaagtttgtctctccccaaccccctagagaaaccattcacaaagatcctattttaccctgccctagaattcaacaaaaacccttaccttaaatttgtagcagtagctcttattctgagaacatcactgcacctcctagccaagggggaaagcagcttcaataaggcagaactttgcctaaaacaggaagttcgttgatttcaggagaaacttatctgttgcatccagcaggggcatcccagttgggggaacacgatggattccgtgcatgaaggttgaaacctgctcaggaaggtccagggtgaccagggaggccactctgaaacactgatgactacatcattttgtggagtgaaattaaagctgccgaggcagaaatactttgataagggtttatttgaagccaaaggtgaggatcaacccagaaagatgcaccaacacatttggatgtgtgccagaatcttttacaatttggaatgtttttataagaaagtttaggagaagagaagggaacttcttatatcagaattgtctgtttttattggagggtataatacagaggtcataatgattagatacaggttataacatacaggctaaaacattttgtatgtaaaaccatcagtgaaactttataagagagggcacagtggcttatgcctgtaatcccagcactttgggaggttgagacgggcagatcccttgaggagaagctcatcgctcctgaggccagtagttcgagaccagcctagccaatatggtgaaactctgctctactaaaaatacaaaaattagctgggcatggtggcacatgcctgcaatcccaacaactcgagaggctgaggcaggaaggttgcttgaacctaggagatggaggttgcagtaagatgagactgcgccactgcactccagcctgggtgacaaagaccctgtctcaaaaaaaaaaagaaaagaaaagaaaaactttatgatttataaatataaagcaaaacttcatggtttagaaacaaaggattgtgcttttccatatcagtggaaaatcagaacatcaacagttggaagaactcataagatctgagtaattaaagataagatttgaggaactcacaagattctttactcaggaacaggatgtaacccatgcatcaagagatcttttccgggggctaattgggactaatgtgactggtaggttatcagcagagaccacgtctgtcttgttcaacctgtgtcccaggtcctagcaccatgcctgctaccatttaagtgttcatgtgaagtttgttgttgagaaactaattacctaaaagttagaacttgacctttgcattttatcgaggaggctatgagactcagagggttacacagctagtgagtggcagagcctggacttgaactcagttgtgctgaagccagaatgtgttccttcctgagcattcaaggacagggaaggtgaaactccagctagtgggcagcccgtgtgcttgttctagggagactgcaggccgattcctgggagctgggtcttcatggtgacacagtaagaacaactcacctattggctgggcgcagtggctcacgcctgtaatcccagcactttgggaggccgaggtggttggatcacttgaggtcaggagttggagaccagcctggccaatatggtgaaaccctgtctctactaaaaatacaaaaattagctgggtgtggtggctcatgcctgtaatctcagctgctcgggaggctgaggtaggataatcgcttgaacctggtggggcggaggtttcagtgagccgagattggcaccattgccctccagcctgggtgacaaagtgagactctgtctcaaaaaacaaagcaaagcaaaacaaaacaaaacgaaacagaactactcacctatgttgtggatcaactgtgtccccactgtaccaaatccttatttatttaaaaaaatttgttttggacccttttcacaagatggtgccgaaagtgaagaaggaagctcctgcccctcctaaagccgaagccaaagcgaaggctttaaaggccaagaaggcagtgttgaaaggtgtccacagccacaaaaagaagatccacacgtcacccaccttccggcggccgaagacactgcgactccggagacagcccaaatatcctcggaagagcgctcccaggagaaacaagcttgaccactatgctatcatcaagtttccgctgaccactgagtctgccatgaagaagatagaagacaacaacacacttgtgttcattgtggatgttaaagccaacaagcaccagatcaaacaggctgtgaagaagctctatgacattgatgtggccaaggtcaacaccctgattcggcctgatggagagaagaaggtatatgttcgactgactcctgattacgatgctttggatgttgccaacaaaattgggattatctaaactgagtgcagctgcctaattctgaatatatatatatatatcttttcaccatatacatgcctctctgtcaatttctggttgggctgggaggccacacacagacactgacatgacagggcttgggcaagactcctgttctacttatccttttgaaatattcaccctgccactccaccatgtgtgatcactccagagatctttgtgactagagttagtgtcctaggaaaaccagaactcagaacttgcctccatggttgagggtaacaagaagctgtacaagaaccccttttatccctggaagaggctgtgtatgaaaccaatgcccagggtttgaagggcgttagcatccatttcaggggagtgtggattggctggctttctggtagcattttgtcctcacacacccatctactgtgtccaaccggtctgtctgcttccctcaccccttgcccaataaaggacaaggacttcagaggaaaaaaaaaattgttttaattattacatttatagcatcccagcttgaaaaacgaagcaacagagacgtgtagaaagttaaaaggtttctactccaattgtaatttctccaattccatcgtggtatgtgcattcttctggatttttttcagtgtgcatacacatgtgtacatacagacacatacacatacactcgtacgttttttatattgatgggaccattactcacatctttaatttggaacttattctctgctctctctccctgtgtctgatagaatgctggcaatgctttgtgatgctttaggagacacatttgtcagatgtgaagacttaggcttaggaattgatgggtggtgactgaggctggtcactctgtggtctggtgcactttcccactgccccactctgggtaggggtggaagggcccctgcagagaagcaccagcttctgttttcccatgagtgactcccctccctccaatactcactaggggactttccataagccaggctgtgtgatttggcccctgagatattcctggttggatgagaaatcttggggagactccagccttctcaggcacaaaactcccagagtagagagctccctctggactatctctcctgcccttggcctcaatttcctgttctgctacctggtccaggaatcaggacctcagtgatgaaacttggcttctcccaggctgcagagtcctgctggggtgtgagtccttgctcatggctcatgaaagttcaacatatgcttatggcttcaatattgggccagatttcacttcccaccttggccttcccaaggatgaattgtgtggtcccatgtgttggtgatctcagcatgaactgcaaaggaagaagaactcatgtgcatttttgcgcagctgggtgccgcatcccatggctgcccttggagggtctccctcttcattcatgtctctgctaaaaggtcacctcctcctggaagccctccctgattctctgatttattggattgtctgatttattggatcattgcctgtctctttacgtgatgtgatacctttgacagctgagcactcactgttgcatccccagtgcctggcacatagtaggtgctcaagaaacatatagttgcatgaacagccctgagaggcatagatttttctttttattttataactgaaagaagccctgagaatcagaaaggttaaggggttaactcccagcatccctgcaaagcctggagccaggaatcttaaaacaagtctacttaaacttgaaggattgtatagggatttcctggggttctattaagatgcaatcctgagttagtatttctggattggggcatgggattctgcatttcctgccagctctcaggtaatgctcatggcgcaggtccctggaccacactttgagtaactgagccttacagttaaagtgcatgttgccagctccttcccttcacctcctctttttgaggctctttcctctgaagactcctcctctgtccccctctaaagcccctcattccacatcccatctcccaaatgcaaaatctgagctcacagcaatttgggaggccgaggtgcgcagatcacgaggtcaggagttcgagatcagcctggccaacatgtgaaaccctgtctctactaaagatacaaaaaattagctgggcgtggtagtgggcgcctgtaatcccagctactcgggaggctgaggcaggagaatcgcttgaacccaggaagcagagtttgcagtgagccgagctcaccctccatcccgtcgcgccaatgcactccagcctgggtgacagcgcaagactccgtctcaagaaaaaaaaaaaaaaaagcctgagcccaggaggggcagtactgcccatcatcaaagcaaggacagagcagaaggagactccactcagggtcccctggctctgccttccactgtctcgacctcgtctgctctcagcttccctcagcgttacccttcacaggccccctctgtcctcctatgctgagcccagcatccaggttgctttcccagctggtctcgttatctccagaatctgaccctgggtaatccccagtggtgctgcattctttgttcctgctcctgtcagtcaggtctcagcctaggtcctgggctgctgggaggcaggacttgaattcctgccaggctggcagtggagggcaacaggcttctgtctctgaatctcctaaatctgcactgagaaatggtgcacagcattctcctggcccacatttggaggggaacttgggggatgttttgggagaaggcttggcctcacccagctcacctggcatctgaacacttcattcctttacctaccttcccctggtcttggaaaggcagggtggctgcacattttggggctcagatcaccattggctgccctccaacttaccctctgccttacatgagaggtaccaaggactgagtggccatgctcggtcaccctgaattggttcttctacagttatggtccccaccagtccccgggttttggttggctgccctggcacaaaggaggcatccaggctgtgaggattggctagtccagccccgcccagcctcctgaagtgtttcctagatctggggccaggagcaaaaacctcctggcaaaggaggagaggaggttgtgcgggacaaccttctcctgacagaaggtgccaggctgggggtggcagggctggatagggaggggcactgcccaagactgggatggctccagggagctggccctggtgatgggtgcttgcaggtaaccagaggtcaagttggctggtggttctagatgaggctgtctggtttctggtctctagtttccttgatctctaattttgtgtcacttctcctctcccctctcccttggcctcttcccctgagattccctgaatctccctccatgctcttaaccatgtttacccatcattggtcctggagctccccagcccctttcctaggcctcaggacctcaccctccatcccgtctgccctgcaggatgtcgctgctgagcctgtcttggctgggcctcaggccggtggcagcatccccgtggctgctcctgctggtggtcggggcctcctggctcctggcccgcatcctggcctggacctatgccttctatcacaacggccgccgcctccggtgtttcccgcagccccggaaacagaactggttcttgggtcacctgggcctggtgagtggcaggaggatggatctagtgtctcagggtggaagggtggaaatggggctcaggctgagggggtgggctcgggtctgggacggcagagaaactcactcattcctctgatcactcactcattcctcttcccactcattcctctcctcactcactcattcctctcctcactcactcattctcctcactcactcattcctctcctcactcactcattcctctgcgcactcactcattcctctcctcactcactcattcctctcctcattcactcattctcctcactcattcctctcctcactcactcattcctctcctcactcactcattctcctcactcactcattcctcttcccactcactcattcctctcctcactcactcattcctctcctcactcactcattcctctcctcacccactcattcctctcctcgctcactcattcctctcctcgctcactcattcctctcctcgctcactcattcctctccttgctcactcattcctctgctttgccatgccaagcctttctcatctccttgtctaggggaagtcacccctagactgttttgaattcttttcctgactgttttcagtacactagtgaacctctgatgggttcctgtggcagagtgggggttacgcagcaggtattcaccattatttccacattatccactgctgtactggaggcctcttgggctcactgtctagaacccactttctgcctggcccatttgcttgtgtccatccatctctgggctggagttttcccataggaagtagctatacaccccctaccctcacatcatgacacagctgggccagaagagagatgtgtgccatctccaccctcccccgtgcaggggcatcttctttatccccactaagctgtcccaatgagttgtgttgcccaacctggataaaaattggccagtgacttcctctttaaagttacctttgacccttcagaccctgccctttcacttagacctgctgtcccctttgggcgatttggcatcagtctgttctttggcaaatggcaggaatgatgggtgtgtccacaggtgcagggtgagggaacacaggacggactagctctgagcttgatgtgcaaaaggtgctccctggtgagagccgctgttcttcctgacagacagttagagccacctcttctcccctgggggctgctgagaaaggaagttccaccgtgtacagaccttctccatgggagggcctggggcccctgaggcccagccaggacataaaaggatgtggggaccagccctggggacatgtcctgaggccacattgctgcccacacaccacacttgtggagcccaccccacgtgactttccgtgggctggagccactcccaggatgagaaaatccatcctctttattcaaggtgggcttctccatgaacagacagtttgtcttccccctgttccctgggatgtagccttggaagttagatactgcccccaagagaagggagcaggagggagtggagattacccctatgtgcgcagaatctggacatgctgttcattgcagaggctgtgccacctctaaagcctgcagtgggacctgctgtggctcctcctgggaaatgtatttatttctccagagtaatagaattaataggatatcaatatctacatctatctatctatctatctatctatctatctatctatctatctatctatcagtccgtctgtctgtctatgatctatctaatctatggagagacagaagagggcatttattataggaattgactcatgtttatggaagctgaaaagtcccactctatgccttctgcaagctggagaatcagggacactggtggtgcaattccgtctgggtccaaagccctgggaacctggagttctaatgttcaagggcaggagaagatggatgtctcagctgcagaggagaaaacaaattcacccttcctccacttttacattctacgtggaccctcaacagattggatgatgcccacacagactgggaaggggagatcctccttcctcagttttccttcaaatgctaatctctcctgaaacactctcacagacatacccagaaataatgtttgactggatatctgggcatcccttaacccagtcaagtggacacaggaggtgatggcccttgccttgcttgcaggtcactcccacagaggagggcttgagggtcctgacccagctggtggccacctacccccagggctttgtgaggtggttgggccccatcactcccatcatcaacttgtgccaccctgacatcgtccgatctgtcatcaatacctcaggtactcctgcagagcttgtggtggtgggcacaggagaacattggagggcttctagatctcatccccaaagcttctgtgcagctcttgtagtactcagccccttccttcctgcttctctctcagccaccttcctctttccttcctgtagtcaccaaccccaacctcagtgtcttttctctctgctgccatcttccccacctccgtgttgttctgggaaccactggggccccgagaagccttaatccaaggccctgtcctggaggaatccccaaacttgaagagatggagcagtacagagacatccccaacttcatggggttcagaatgggccaggaggagataggctgtgacagagcataggagaacaaggtttctactggggcaggctggaaggcttcctggaggaggcgtagcaggagctgggtgtggaacgatgagtgataattttttttttaaagcaggggcagggtgatgcagtgggcattgttagtattcaaggctccgggccaggcttggcattggccttgtccttctgcaggcccagagcaaggacaagaagatgagaaggagttgtggttggtggaagatctaggctgctatttccatgacattcacctcttgtgggtcgattccttctaatcccatcctgtggcacttccaccatatgttcattgccctcttgctccaggccccaggaatctccaataggagacaccaccccagcctggagccgtacccttgccctctgcccttcccatctttggacaggccagggagagcagcagaaggggtatcacgccacagagaccatggctcaagccccaaaatgctgagtgactctgggcaggtccacggctctctatgggtgctgaggtgtctttccattgtgagtggtagaaactcaaccccacgcagtctaagccattaaagagaagctattgactgcaacatccagggaggttggccttcaggcacaactggatccaggtctcacctaatatcatcagaattctgtctttaactcttattctgtaaatgtgttttgtagagtgttgacttatgcttgggtgttgcagaacatgttggaccatgtaggagccatgtcaagacatgctgggtgtgctgtaccatgtcagggtgtatcattgctctatagtgttgttgcagcctagtccggtcccctttatgccccccaccctcctttcttcttctgcccatggcctccttcctgctatgctgggcttggagaaaagacgtccaaacctctggctgggagccaccctccatacccaaagtccctcctctattcctctccatggaccctgatggtcctcattcatgtcagatgccattacagacaaggacatagtcttctacaagaccctgaagccctggctgggtaagtaactgtaggtggacgggacggggaccaacttttgtggccaggggaagattctgcccttgcccacagcctttggctgccgtactaggggatgggctcttgttaagtgttggtgacaagtggagacaccaccgtcgcttgctgacgcctgccttccatttcaacatcctgaagccctatataaagattttcagcaagagtgcaaacatcatgcatgtgagtgccttgaactcagcatcccagctgcagccttggggtggagggatcacatacaattgggtctggaatgttggctctcctgggtgggtttggggccattgctcttcctctctgtgccttgatttccccatgaggctaataatcctcactaaaaggtggtaggagcatgtaatggactcatgtctctgacacttagtaggtggtcagaaggagtcaatttccacatttttctcacagaagccctgtaaactcaagaaaggaatgatgacacgtgcatagtagtcattgctgagtacagatcacttcaaaactaattggtttagagcaataagggtttatatttgctaacaaatctgtgggactgttggccagcccttctgcatgtggataggatccctcatggtataagagcagctgtgggtcaggtaggcagctttgcttgtgccagctcagttctctcacatatttggagctttgctggcttctggctgatttaggatggcctcagctgggacacctggacttttctccatgtgattctctgcctctagatgacaccccaggattgctcacatggcagagacaggattccaaggcagtgagaggaggatacaatgcttctcactagttattattatttattttatttttgagatgaagtctcgctttgtctcccaggctggagtgcagtggtgcgatcttggctctctgcaacccccgcctcaagcaattctcctgtcttagcctcgtgggtagatggaattacaggcgcccaccaccatgcccaactaattttttgtatcttcagtagagacagggtttcaccatgttgggcaggctggtcttgaactcctgacgtcaagtgatctgccctcctcggcctcacaaaatgctggaattacaggcatgggctgctgcacccagtcaacttctcactagttatggccttatcattttcaccacattctattggccaaaaaaagtaaaacgtccaccatgaatcaatgtggggcaaaataggctccatctcttaatggaagttgctaaaaaatcacattgcaaaagatgtggatgcagggagaagagaagaaatggagccaagcgttttgtgaaacgactaggatttttttttctcctgtgagctaataaattagcttgttacttttgcatggattctgccagaagacacgagacttctgggtcaaagacaaaagtttattactcatgtctcagcaagtggcatgtgcatcttgttggtttggatcctttctctaagccacccaaattccctggggtgataaggtgggcttctatagatgcctgccatgtagtatatttgcatgatggggaggagcattaggcttagagaatcagcttttagagcaagcagaataagcctaacgtgtgtcccagaggagccattaccttataccccaaggctgttctctgcaaacacaatgctgagaaatagcccagattaagaacctcagggttgaccgggtgtggtggctcatgcttgtaatcccagcacattggtatcacttgaggtcaggagttcgagaccagcctggccaacatggcaaaaccctgtctctactaaaaatacaaaaattagcagggcgtggtggtgcgtgcctgtaaccccagctactcaggaggctgagacaggagaattgcttgaacccagcaggcagaggttgcagtgagccaagactgtgccactgcactccagcctgggcaacagaacgagactccatctcaaaaactagcaaacaaacaaaacaaacaaacaacaacaacaacaaaacttcagagttttgcattcttggcatgctcagaaaaaaatgttcagggggatcacagggactttttgtaatcaatttataacaatgaagatgaatcaagataatatttattgagaactcatcatatgacagaaatgatgtaatatgcctattccatggtgtatgtggtctcatttaatttacaccgccttgtgaagtagaggatattttccaccctctcccccatgccatgacaaatggtgaaactgagggccagagaggttagagagatttcccaagttcacccagcttgtcagtgagtctaagagtgggggaaaaggggttctagcctggctccctggcatcaaagcaggtcatcttgattgctattgaggatttgacaggtgagacctagaggagggctgtgagttgaccaagggtacacacagcttaggaatcacagctggggcttgaacccagccatgggatcttcatctcctaatagtaacagcttccactctcacccaagcgtagtcctccctgaggatgggggtctgggacagaaaaccaggagcatgcctctgggggagtccatcctggtggttggggttgcagggggactcagaggagccaaggcctggccccagccctgctcccttctctggccaggccaagtggcaacgcctggccatggagggcagcacctgtctggatgtgtttgagcacatcagccttatgaccctggacagtctgcagaaatgcatcttcagctttgacagcaattgtcaggagtgagttcttgcccagggcctgggaacatgggatggagtgggggtgtgggtgtggggagagcaaagcccagggagacaagaagagccttcctggagagatgatgagaactaggcattgaaggacaaagaaggagagaaggagagagagagagagcgagagaaagagaagtttcctccaaacaagtggaactgtttgggtcaaggcaaggaggctaagatgaacagagcatgtgcaacaggcagttgggagacacttggaaatgaaggtggaggggttggcagttaactagatcttaaggatcttgaaaagtcagacaaagggagatgcattttatccaaggttcctaaggagccatggaggtgtttgagcagatgagagacatggtcagtactgagcttggacactggactctatgggactctatggaagattgactgtcatgtagacacagcatgcaaggatgccagggagaggaggtctgagtttggtggagaaaatggggcagatttgggagaaactgagtaataataggcaggagcagatgttttataagacagagagaggagatgcccatgatggccaagctgtgccctggggacctggggcaggaggcagctcacagagagtgggaggcagagagtgaagtgcgcttgcaggacacccctttctgcatggaatgtggtcctgggattctggctggaaggtgctcccaggctttcatgtgggtaaggagctgcttcctctctctggactggccctgcaggaagcccagtgaatatattactgcgatcatggagctcagtgcccttgtagtgaaacggaataaccagttcttccggtacaaggacttcctgtacttcctcactccctgtggacggcgcttccacagggcctgcagactggtgcacgacttcacagatgccgtcatccaggagcggcgccgcaccctcactagccagggtgttgatgacttcctccaagccaaggccaagtccaagactttggactttattgatgtgctcctgctgagcgaggtgggcctctctgggatctgaattcaagaggtaaaatggagcttcaggtcaaatgtcagattgaaggaccggacttgatacagagggcactaaggagccatggaaggtgctcgaagaagggagggacaagtcagataaattttagaggtgattgcatagaaagcttcctgggaagaacaaacaggaggtcggaaggaagcatgtgggggtagatctggaggtgacaagggagggatccttctgggataatgggtcttcagagactgtttcagtttagactccagtgaccccagaactagtgtgattggggttcttgtctccaggataaaaatggtaaagagttgtcagatgaggacataagagcagaagctgacactttcatgtttggaggtgagtgtcccagtctggggctacagtggggacaggggtctctccactccagggaagtggagggccggccctgaatcacttcattctgcccaacctccccctcccctcaaccttcctgagagcctcaatgtatgggcgctgtccaccctctgggtgctgaagcagcccagagactcaagcctgcctggctgaccctcaggccatgacaccacggccagtggcctctcctgggtcttgtacaacctcgcgaggcacccagaataccaagaacgctgccggcaggaggtgcaagagcttctgaaggaccgtgagcctaaagagattgaatggtgagtgcaggtgctggtggctctgcctttctgcctttctgagtccttctcgttggttcttctccccaggtgggggaaaaggggaggatctttttgatgattctgccattgttgcctagtgggaataggagtagagcccagaaacaggctagcaagggtaacattgcatgctttggggacagaatggtctgggagtccatatttatttccccactaacttgctatgcaagcttagtaaaatcaattcccttttctgaacaacttttctcctttgtaaattgggggtgtggggaattgctgtcccacagggctgcttggagaattaacggcaaataccgcaatgacttttggaccaatctaatattatgatttatcaaaacattctcttatcaacgcgtgtttttatactttccagccttttggtataaaagacatgatgtgttgaatatcggtgtacgatgatcattgctgacatgtcatctttgtagagcagattcctagaagtgcaactgctgagccaaagaccatttgagttttacaattcaatagctcttgggaaatctactgctatacacagattttgagaataccaaatttcctcataacctccccagaagtgcctattatgaaactaaaacatttgccaatctgatagatgcaatataatattttgttattttaatgaacataactttaaatgtgggtaaagttgagcactgttttcacctgccgatgagccatccatatctatttttctgtgaagtcagtttttgcgtaatttgttttttctactttgggtcgtactagttttcttatttacttataaaaactctttacatattaagaaaattatttcttttttctgttatgcaaaatgttgcctcgcattgtcttggactttatttttatttttggttcatttatttgtcaccaaatttattaattttttcttttataattcctgtttgtgtttcttaaaaaaatatttaaaaaccattttatactctaatagtaaaatgcaaaactcttgtttgacttattttaataggcttatatatttttaaaagtttaacattttatcaatatttttcacatttagaaatttttccctttgaaatctatgttggaatctattttttctccaaatgtctaattgtcccaaccaagtttaatgaatattttgtccttgtgtcatgattctaaataacaacaaattcacaagaaactatgtgtgtgtatatatatatatatagtgtatatatatagtgtatatatatatagtgtttgtgtatatatatatacacacacacatactatatatagtgtatacactatatatatatgtattttaaggcaacaaataaaaccatatatatatatgcctatcttaggcatgtatgtatatatatggttttatttgttgccttcattttgttccatttattatgtagtcctacatgagcagcatgaagtctacttttaaaaacactttaatatttggtagagtttgttctgtctcattactttgtgtttacagttttttttccctcgagttcctatttttttccatttgaactctgtgatcaggttagccagtttgacaaatacttttgaaaatgttaattaataaattttttggaccttaggtgctaatgtttgagttaacgatgctcttcaattcatggcaaattctcgtcatttttctatacaatacgtatttcttcccatttatctcaaatctctccttccagctctccatcagtatgattacaaaatggtggatacttttatctgtaaaacttgttgttggggtggatacattttaaaattctatatatgtttttatttcacagatgttgtgctggttcttaccttttcagaaatatagcactatgatttgtgctacgtttgcagcaccgtggttgcatgctatgatttgtgctatataaatgtagcactatgatttgcagcaccgtggttctaagtacatttattctcttgcttttagctatgatctagtccttttctcttcagttctgtagtggatacctggactgcttctatctctccagtgcaatgaccatctttgtgcatatctctttatctgcatgtctgataatttctctgggatctacagttgggaaccagcttgctgggctgtaaaacacacatctttccttggccatgtcctggaggttgccttccatattggcagcttctgtgcaccccactgtcagtgcatgtgacccctctacccacacctcagccaacccttggcaacacctacctttggccattctagcctcgaatagatgtgaagtggtacctcgttgtcagctagcttccatttctatgacagctagtgactttgcgcatctcctcttacatttctcatgtttgagcatccatgaattcttagatcaaatcctttgtctacttttcacttgggttacctgttcgttctcttgtagatttgcaggaattcctaacatattcagatattgttctggatatctatctatctatctatctatctatctatctatctatcttaggcatcttctctgaatctcttatctctcattggaatgttaattgggtccactgtatcttttactgcacagaaatccttaatttgcatgcgtatttatcctttatattttatcttgtttaagcttttggggttttaagaattcctactcttaagtcacaaaaatttctcctatgttatcatcttttaacattataattttacctttctcataaaggaaaagactccaccttgtatatgcagtagacaagaacctgtttctctctgttcccacatttccagtggtctgaacaacttccaccacactatccattctccaggggcgtgtggaccttcctttagcagatgttaagtttccccctattcacaggcctgattctgagctctctactctgttctatggatctgtttttctgttcttgcagcagtcccacagtttttttaaaattattttatttttattagtatgcatttgtaatatctcttaatatctggaagcttgggttctccttcttcaatcttttatttaaaaattgacctagcttggatagggcatggtggcttatgcctgtaatcccagcactttgggaggctgaggcaggcagatcacttgaggtcaggagtttgagaccagcctggccaacatggtgaaaccccatctatactaaaaatacaaaaattagttgggtgtggtggtgcacacctgtaatcccagctacttgggaggctgaggcacaagaatcgcttgaacgcaggaagtggaggttgcagtgagctgagatcaggccactgcactccagcctgggtgacagagtgagaatccatctcaaaaaaaaaaaaaaaattgacctagcccttgatgaactttaaaattccttcaattagaataagatttcaaagttccaaaaagaatccagctagatttttattaattgcatgaagtatattgattagtttagaaataattgacacctttacaacatatggtcatcccaccctacagtgtggagtggagattatttattcaaataactttataagccctttgtagagatgtttttttcctgcttttgttacctctttatataattttaaatactttttcacacaaacaaatgaacacttttgtttttgagatggagttgctctgcctcccaaactggagtgcggtggagtgatctcggctcactgcaacctctgcctctcaggttcgagggattctcctgcctcagcctcctgagtagctgggactacaggtgcccaccaccatgcgtggctaatttttgtgtttttagtagagatgggatttcaccatgttggtcaggctggtgtggaactcctgacctcaagtgatcctcctgcctcaggcttccaaagtgctgggattacaggagtgagccactgcaccccgccggaatgaatacttttaagagacaccctctgaatattgttttgctcagaaatacctctaaaaacaccaggtcaacttttcttctagtagttttgtgactttggttttctaatgcttacatctttgttgcttctggaattaattttgttataggactgagggtcagagggaggtggtgagagggtctccaggggcagcaggagggccgtgtatgctctctggataattgttgggtgtttccttagggacgacctggcccagttgcccttcctgaccatgtgcctgaaggagagcctgcggttgcatcccccaatccctacattcgcccgcggctgcacccaggacgtggtgctcccagacagccgagtcatccccaaaggtgccctccatggcaggggaggagggtcctgggcagggcggtggtcccagcaggcagctcggaccttgttcttactgtcctctcctgcacgacagggaatgtctgtaacatcaacatcttcgcaatccatcacaacccctcagtctggccagaccctgaggtgctgcccctccctgtttctccatcccccgggcctggtcgggggaggggtcttgtcccggaaaaccagatactccctctctactccacccacatctgttttatgtgggggtggctgggtgtcctgagaggccccatcagcagccttaacttgcctccaccccaggtctatgaccccttccgcttcgacccagaaaacgcccagaagaggtcacctatggcttttattcctttctcggcggggcccaggtgaggccagggggtgtctgaggtgggcatgggctgagggtggcacagatggctgccttgtcagatgcctgacttgtaggaccacgtgtttctgtgataggggttttaaagaagatcctaggaaaaagggtgtgctcagagcctcctgccccgtctggtttcagttggggctggggtctgggctaggctctgggaatatgcaagcccacatgggggtcccagacccagcttcccccctgtctgcccaaggtgatctgggtggggttgggggttccgggcctggttcctggcgcagtggggccgggatctgggtcctgggtgcagtcagaccttccaccttggcccccaggaactgcatcgggcagaagttcgcgatggcagagatgaaggtggtcctggcgctcacgctgctgcgcttccgcatcctgcccgaccacagggagccacgcaggacgccggagattgttttgcgtgcggaggacggactttggctgcgagtagaacccctgggctgaggcctgcagtgacccacccacctacctttgcatcacctacctttgcaccaactaccttttcagatttccggtaataaatctgtgttggcccctgtgcctcagtcccgcggatggccagtagggggcgctggaggactgcggggatctagggcctggctgggaagaggcggggagatgtctctgtgcccaagatactcactgcctctctgggtgagcacaggagccccgtgctgagggtgggatctcccagagtctaagtaaagactttttcccccccaaaataattgtgtattctgatataaatttttgccaatttagaatccctgttttttagctaggtgcatagcagcctgaaatacagatcacatttgaaagcctttcttgaagctcaattggttaagtgactgtggctgtcccatgtgtagaagccaaagattatgtggtaattctggtaacctttcttaagagaaagctgctacagtctgtctgctcagtcctcccctcttccttcctgctgcttggaagatttttttttttttttgagacatggtgtctctcgtcgcccaggccggagtgcagtggctcactgcaacctccacctcctgggttcaagtgattctcctgactcagtcgcctgagtagataggataacaggcgcctaccaccacacccggctaattgtatttttagtacagatggggttttgctatgttggccaggctggtctcaaactcctggcctcaagtgatcagcccacctcagcctcccaaagtgccagaattgcaggtgtgagaataaaaattcttgagtttcaatgtttattttagaatcaggtgctaacatgcaaatttattacaaaggtatattgcatcatgctgaggtttggagtatgaatgactccatcacccatgtagtgagcatagtatctaataggcagtttttcagcttttccccctccctgcttcccctgtctagtagtccccaggatctgttgttcccatctttattaccatgtgtatccaatgcatacctcccacttataagtgagaacatgcaatattttgttttctgttcctgcattagtttgcttaggataatggcccccagctgcatctatgttgctgcaaacgacatgattttgtactttttaatgactgcatagtatttcatggtgtatttctacacattttctttatccactccaccattgatgggcacctgtgttgattcagcatcttcgctattgtgattagagctgcgataaacatgtggatgcttgtgtctttttggcagaatgatttattttcttttgggtgtatacccagtcgtgggattgctaggtcaaatggtagttcaactctcaattctctgagaaatatcctaactgctctccacactccattagtttagtggctgaactaatttatatttccaccaacagtgtataaatgttcctttttctccatagccttggcaacatctgctattttttgactttttaacaaattgcttgcaagattgatgtggcctctggagctccatcttggctcatgaggacagggactgctatttagggcagatggggcagatggctagaagcagtcagggtctatgaccctagatccatgctgtgacctgaatgtttatgtagcccccaaatccatacattgaagcctagtctgcatatggtggtattaagaggggaggcctttgggaggtgattaagttgtgagggctctgccttcgtaagtgagattaccccttataacagagacctgagggagcttgtttgccccttccaccatgtaaagacacgtgcaaggtgccatctatgaggaacaggcccttagttgacactgaacctgcaggcaccttgatcttggacttcccagcctccaaaattgtaagcaataaatacctgttgtttataaactacctagtgtaagttatgttgtcatagcagcctgaatgggctaagataatccatatccccttggaattgtactaaacatcaccttgaagttgtattataaatgtcagaatcccagtctgctattcactagctgattggcttggggaaaacttgtttatctctgtagccctggttttgtttaccacttaatagtattcacctcattgggctgctggaagactgaacaagccagtatctacaacatccctgagccacatctgttgggtattagcggtccatgagggttaattgcctctctttctcttctttttgcatcacatttgaagttttgacattttaaaaaatcgcaagaggttgcttcaagctttgggatgcatggcaaccttctcttgaggaaaattcattcgaatgttttgtgtgctcaaaatatccgttattacatccgagaatctacagtggactttggtgaaaggttggcccaaagcttagaacggaaaaaattaatttttccagagaggcacgactcagaatttattcctgtctaaaaagttcaggtcatgaaggttttcaagtgagaggaaggtagagggtgtgggctgggcggggggcgggcggggggggggaggggccgcccctttcagcaccagggacagcggctgcacctggactttcccctgtctgactgtagggggctcctgcggggcgcagagtccaaggactgagcgcttttcaggggcccatagattgggaacctggaaggattattggctgcaaaataagaatggaacattgcaaaacgaaataaataactatttaatatattctatgctgaaagtcaatttttcttccctttaaagtttaagtttcataaataatgcatgcttatagaagaaattgcaagaaataaaaatcatccataatttcaaaatgtcagaataatcactgtttatattttcttgcatatgcttccagtttttaattcatatgtgatctttttacatatgaaaatgtttatttacatctatatagctgtgtcatatcacatttgcatgtaattttgtttacaagtgctattttcctgccaaatgagcacatgaaaagatgctaaacattattcccattatgcaaaccaaaagcacaacgtgatgtcacctcaacacctacaggatggctagcatctaaaaaagggaatataacaaatgttggagaggatatggagtaatcgaagccctcatccattcctggtgtgactgtaaaaatggtgcagctgctgtggaaaacagtctggagattctgaaaaactaaaacatagaattactatatgatgcaattccacgatatcatattaagctcctagctatatactcaaaagaatagaaaacagttgttcaaacaaaaaagcttgtacattcgtgcttatagcagccctattcacaattgccaaaaggtagaaagaactcaaatatccattaacagatggatggataaagaaaatgtgatctattcgtataatgaaatattactcagccattaaaaggaatgaagtactgatacatactaccacctggatgaaccttgaatacattatagtatgtgaaagaagtcagacacaaaaggtcacatagtgtatgatttatttataagaaatgtccatctgggtgtggtggctcatgcctgtaatcccagcactttgggaggcccaggcaggcagatcacttgaggtcaggagttcaagagcagcctggccaacagggtgaaaccccgtcgctactaaaaatacaagaaaaattagctgggcgtcatgggatatgcctgtaatccaagttacttgggaggctgaggcaggagaatcacttgaacccaggaagtggaggttgtggtgagctgagatcatgccatcacgccactgcactccagtctgggcaacagagtgagactctgtctcaaaaaaaaaaatgtccagaataggcaaatctatagagacagaaaggagattggtggtgtcaggagctgtggggaagtgggaagaggaagtgctaatggggtcaggatttcctgctgggtggtgaagatgttctggacctagatagtggtgaagtttccacaacactgtgcatataccaaatgctactaaattgtaccctttaaaatggtgaattttatgttttgtgaattttacccaaacaaaaaatgctattttatctcaaatttttgttaatttgggctactcacacgatatgctgttaacatctttccatgacatcaaatcattttatgaaacattattttgtggttttaacaaatatttgggttatgtattcaaaccactctatttcttaaaaatggcgtgatgttacaaaatgatataaaagtgctttgtctcacgttgcaagaattgtcttcatacaagttgacagtttgaggtatcattggttacaaattgagtaacttcatcaaataagttttggggtaaagatttcattttcaaagcaatagataacaactattttttgtctttctactcaatatatgggtagtttacataccgcagttacagtgttatagtattgtgtttgtctatgtacttacagtgagttttgtaccttcagatgatttcttattgctcattaacatcttcttctttcagtgaggaactccctttagcatttcttttaagacaggtctgcagatcccttaggttttgtgtgtctgggaaaatctttatttctccttcatgtttgaagaatatttttgctggatatactattctaggataaaagttcttcccttcagcactttaaatatgtcatgccactctctcagcatatgaggtttccactgagaagtcttctgccagacatattggagctcctttgtatgttatttgtttcttttctcctgttgcttttaggatcctttatccttggcctttgggagtttaattattaatctttttttttttttgacaggatctggctctgttactcaggctgtagtgcagaggcatgatctcagctcactgcaacctctgccccctgggcttaagccgtccttcaacctcagtctcccaagtagctgggactacagatgcataccaccatgcccggctaatatatatatatggtagatacagggttttgccatgttgcccaggctagtctcaaactcctgggctcaagcaatccacctgcctcggcaacctaaagtgctgagattacaggtgtgagccgccctgctcagcctaactattaaatgttttgagttagtcttatttggattaaatctgcctgcttttctgtaaccttcttgtacttgaatgttgatatctttctctaggtttgggaagttctgttattatcctgatctctctccacctcctctttaaggccaagaattgttaaatttgcccttttgaggctattttctagatcctgtaggcctacttcattttaaaattcttctttcttttatcttctctaactgtgaattttcaaatagtctgtcttcaagatcactaattctttgttttgcttgatcagttccgctgttgagggactctgatgcattcttcagtatgtcaaatggatttttcagctccaggatttctttggttcttttaaattatttcaatcttggttcttcttaattatttcgatctctttgttaaatttacctgataggattctgaattccttctttgtgttgtcttgaattttactgagcattctcaaaacagctattttgaattatctgcctgaaaggtcacatatctttgtcactctggaattgatcactggtgttgtatttagctcatgtggtgaagtcatgttttcctggatggtcttgatgcttgtgaatgtttgttgatgtctgggcattgaagagttaggcatttactgtagtctttgtggtctgggcttgttcgtacctgtccttcttgggaaagctttccaaatattcaaagggaattgagtgcagtaatctaagtctttgataaccacagctgtatctacacagggagcacctcaatcccagtaatgctgggactcttgcagattagtagaagtactgccttggttgtcttgggtaagatctgggaaaattccctggattcccaggcagagactcttctcttcccttactttcccccaaacaaatgtgtctctctctcgatctgtgctgatctgtctggagctaggggagggttgacacaaacacccctgtggcatctaccactgggactgtgctgagtcagacctgaggccaccacagcactgggtcttgcccaaggcacacagtgaccactgcttggctaccacctgtgttgactcaaggcccaagggctgcataatcagcatgtggtaaatctagccaggccttgtgaccttcccttcagtgcagtgagttccccacatatctggtgggtccagagatactgtccaggagctgtggcctggaatcagggactccaggtgctccatcccactgtggctaagctggtacccaagctgcaagacaaggtcccctttactcttacctctcctttcctcaagcagaaggagcttctccccgtggccactacggctgggaatgtgctgggtcacacctgaagcccgtatggcactgagtctcacccaaggcctgcaacaagtacaacccagctaccactgatgattattcagggcctatgtcctctttaatctgcaggtggtaaatcctgccaggactgggtccttcccttcaaggcagcatgtttcctttgtccaagagtgtgtttagaaatgttgtctgggagctagagcgtggaatgggagcctcaggatgctgtctggtgccctattcttctgtggctgagctggtatccaagctgcctctcctcaagcagaaggaagaagtctctcctggagcagcaagctgtgctgcctggagttgtgggagggatgatgcttgccaagactcccttggctgccctggctggtgcctcactaggttgtgtgcaccccaagttctctggctctgagcccagcgcagcaccaggacttgctccagaattgcagtccttgtagctggatttaccacatactgattgtagagcccttgggcctttaacaaacataggtggtagcctttcaagtttatttaggaccctggagcactttagcctgcaatggtggtactagctggaactcaggttctgaccactgggatggacaattcccttctgactagggctggcctaaatgcttcctctgtcggcactggctaaattctaccccatgttgctttctgctgtgacagggcagcactgagtttcaatgcaaagtcccatgatcactgtgctctctcccctccactcaagcacccagattctctctccagccatgaggccacttctgggagatggggaagtgttagtgtaggcaatttaagactcttttggccaggcacagtgggttactcctgtaatcccagaactttgggaggccgaggcaggcagatcacctgaggtcaagagttcaaggtcagcctggccaacgtggtgaaaccctgtctctactaaaaatacaaaaattagctgggcgtggtggcatgagcctgtagtcccagctacttgcgaggctgaggcttgagaattgcttgaacccgggaggcagaggttgcagtgagctatcgtgccattgcactccagcctgggtgacagagcaagattctgtctcaaaaaaaaaaaaaaaaagaaaaaaaagaaaaagaaaaaagaaaaaagaaaaaaaacctgtcttttgtacattctttagtgcctctttaaatttttaatttttgtgggtacatactaggtatatatgtttatgaggtacatgagatattttgatacaggcatgcaatgcacagtaatcaaatcatggagaatagattatccatcccctcaagcatttatcctttgtgttacaaacaatccagttacattcttttcattattttaaaatgtacgattaagttattattgactatagtcaccctgttgtactatcaaatagtaggtcttattataggtctaattaattctttctatctttatttgtacccattaaccatccctaacttcccctcactcctccactccccttcccagcctctggtaaccatccttctactctctatctccatgagttcaaagtacctctttttttgatatgatgttaaaaccagataccatgatcactcacctaatttttggttcttatgaaggtattttcttgtgtggatatttgttgtatttggcgttcctgtggaggagacgatcaatgacgcattttattctgccatcttgctctacctcctcctttttgtgattcagatgagactccttgacagctggtggctaaattttcaaatgcaatatttttggcagaaaatatattcactcatgtaaaaaataaaatgcacagtgaaaaatgtttcttgtacctatgcccttcatttatccagtctcgccgtctttacaaaggtaaacacttttactttttctgtatcctttcatagtatatttaggcaaataatacatgtaattaatctcctttgttcaggatgatgaattgccccccccccccacgatggtcagttcacctccctggggcacaactgtaaaaccctcacagctctagctgtattcagggtcaactccaccagccatttcatccaccatatgactcctacagatgagatacgtaaggtgcagacaggttgagagatttgcccaaggtcacacagccaggaaatagcagaactgtatccaaacctaggcctggtgaacatccacaataccgcatgcctcctgcatggtctcaaactccttctccttgtccttgcctgtggacagccccactcatcttaaaattacatttacggccaggcacagtggctcatgcctataatccaagcactttgggagtccgaggcaggaggataacctgaggttgggagttggagaccagcctgaccaaaatggagaaaccttgtctctactaaaaatacaaaattatctgggcatggtgctgcatgcctataatcccagttgcttgggaggctgaggcaggagaatcggaggcggaggttgctgtgagccaagatagggccattgcactccagcctgggcaacaagagtgagactccgtctcaaaaaaaaaaaaaaaaaaaccaaaaccaaaaaaaagcaaaaaaccaaaaaaacatttactcagtaggcactctttttttttttttgatgatgagtatcgctctgtctcctaggctgaagtgcagtggcatgatctcagctcactgcaacctctgcctcctgggttcaagcaattctcctgcctcagcctcctgagtagctgggattgcaggcacacaccaccatgcccagctaattttttgtaattttagtagaagcagggtttcaccatgttggtcaggctggtctcgaactgctgacctcgtgatctgcccgcctcggcctcccaaagtgctgggattgcaggtgtaagccactgtgcctggcccagtaggcactctttaagagcaggtgtcacacagtagaaactctatgtagaccatatgtagaccatgagtcacagagtgggcacactatgaagagcaggtggcagcagtaggcactctttatgtagagcaggcagcagtgagtaggcactctttatcaggagcagatgatactcagtaaacactctttatatagagcaggtggcatctgtaggcactctttatctagagcaagtggcattcaatgggctctctctcttttttatttttttgtgagacagagtctcactctgttgcccaggctggagtgcagtggtatgaactcagctcactgcaaactctgcctcccgggttcatgagattctcctgcctcagcctcccgagtagctgggatcataggtgcccgccaccacgcccggctaatttttgtatttttagtagagatggggtttcaccatgttggccaggctggtcttgaactcccgacctcagatgatctgcctgccttggcctcccaaagtgcttggattacaggcatgagctactgtgcctggccagtaggcactctttatgtattgcaggtggtactgagtaggcactttttatgtagcgcaggcaagagtaggaactcttcatgtagagcaagcagcactcagtaggcaccctttatgtacagaaggcagcccacagtaggtacactttatggagcacaggcaacactcgagcaggcagcactcaatagaccctctttatgtagatcaggaaacactcagtaggaagtcaccatatagagcaggtggtatcagtaggcactgtttatgtagagcacttggcactcagtaggcatgtgttatgtagacagcaactggtgctcagtgggcactcttcatatacagggggtggcactcaataggcactcactatgtagagcaggtggcacacagtaggcactctatgaggaatatcaggaactgagtatacagggttaatgtagagcacctggcacacagtaggcacactttatggaaagcacttggcacagagtagacaggatttagcacctggcacacagtagctgcccttcatttagagtattggcacacagtagaagtactttccatgcagcctttgtgcagagtagagactggcacacagcagctcaagtgctagttgccaccctttcccttcactcctttttggggctccctcctcttaggagccctcattgtcccccgctaaggccctcatcgaacatcccatttcccagatgggaagactgcacccaggaggggcagtactgaccaaagtcagagcaaggatgaggcagaatgaggactccattcatggttccctggctctgcccttcccctgcctggaccccatccgttccctctcatcctaaccctccacgtccccgctctgtcctcctatactgagtccggcctccagatttgcttttccagctgagctcttaatctccagaatctgacccaggtaatcctcagtggggctggattctttgttcccgttcctagcagtcaggtctccaacagggccctggactgcctggaggcaagacttgaactccatccagcagcagggggatagaggcttgtctcttccaggttgcctgattcagcatccagaagtggtacacggtgtcctaccggcccagggttagagaggagcacaggagatgatctggaacaaggcttggcctggcctggctcgcttgacacctgaactctcaagttcatgcttttatctgccacacactcagtaggtgctctttaagagcaggtgtcacacagtggaaactctatctgacccctctcggcttactctccaccttatgtgggaggtgctgagacctgaggatccagtgcctgtgctgtgtcaccctgagctggttcctctgcatccagctggtctcccacacccaggttttggccagctgcccagacatgggagcggcacccaggctgtggggattggctggcccagcccagcccagcctagcctcccacagccttccctacatcaggggccaggggaaaaaacctcccagaagaaggggagaggaggttgtgtgggacaaggtgctcctgacagaaggtgccagggtgggggtggtgggcctggggcatcctagcctgtgatggagatgggcactgggcaagggattgggcgcacacataggggagccccagccttcccacattctccattgctgcccaaggcccaggcagctcctggttgctggcttggaggatgagtggttttctaactgaaaccaagcccctggcaacgtcctaatgattcaggctgggcctttctggactttaatcagtttctctgtctttctcaatctaagtgcttaccgggtaactggaggccacttggttgctggttttggctgggcctttctggactttacccctcagcccctgtttatccatccctgtttactcttactgttctatctccagcactgcccgtctctgcctctctccactgtccctggagctccctgggcccttccctgggcctcaggacctcactcaccaccccatctgccctgcaggatgccacagctgagcctgtcctcgctgggcctttggccaatggcagcatccccgtggctgctcctgctgctggttggggcctcctggctcctggcccgcatcctggcctggacctataccttctatgacaactgctgccgcctccggtgtttcccgcaacccccgaaacggaattggttcttgggtcacctgggcctggtgagtgtggcagcaggacgggtctggggtctcagggtggatggacttcctgaggggtaagaatgaggctcaggtgagagggggtgggctggggtctggggtggcagagaagcaggggaggcgtcttactcattcctctgcttactcatttctgtgaggtgccaacccaagcccttctcacctccctgttctcccactcttggcctgtgttgaatccttttcctgcctgtctttccacattaatgcacctctgcggggctcttgggcagggggttgggtgcacagaaaggtgaacccctggcgttcccacattctccattgctggactcgaggcctcctgtacccactgttcagggtcctctccctacctggcctatttcctcttatgagggtataggtgggccagaggagaggtgtgggctgtctctcacctccaccacatccggaggcaccttcctcttatcttgttcctccccagtaagatgtcccaatggggtcctgttgccaaacccacataaaagttggccactcacttcccctttcagaagccttccctgacctttctcctcccccagaccttgccctctgacttagacctgctctcccctttgcggaacgtggtctcaatctgctcattgcaaatggcaggattgatgggtgtgtccacaggtgaagtgggagggtgcacaggatgcactagcacagagcctggtgcagaagcttctcccaggtgggagccactgtcatgatggacagttagagtcacctctgctcccctagtgactgctgagaagggaaggtcccctgtgtgcagaaccttctccatgggaggaactggaacctgtgtggctggtggaggaaccagccagggcatgaagggatgtggggaccagccttagggacatgtcctgagtccacactgctccccacaaacctcccctgtgaggacctcctcatatgcccacctctgggctgaaatgactcccagaacaaggaaatttttcctctcaagctaagtgggcctctgtgagtggacagtgtgtcttttccttctgccttgggatgcgctcttgggacttgggggtggccccaagagagatagagcaggaggaatgtagacagatagataggtaataggatagatggatggatggatgcacagatagggtgaatagatggctggctggctggataagtaggtgggtagatagacagatagatagatagataacaggatagatggatggatggacagatggatgcatggataagatggatggatggatggatggatggatggatggatggataatacatacataaagtagtagataagatggatacattaggtggatagataggtagagtggatatgtaggatggatagattagatggatggatagatagctagatgattgatagataataggataaatggatgagtggatgaatgtacagataagatggatggatggatggatggatgggcagatagatatatagatagaaaagttagataggatgaatagattagatagataaatgaatagatagataggtaggtagatagataataggctagatggatgaatggatgcacagataggatagatgaatggatagatagacagatatataagatagaatggatggattagatagatggatagatacatagaaacataggtagatagatagattagatagatagatagatagacagatagatacatacatacatacatatatagatacatagataggtagatatgtagagatatatataggtaaatagatagatagatagatagatagatagatagatagatagatagatagatagacagacaggcagacagacagatagatagatagaagagggagtttatttcgggaattggctcacaggattatagaagctgagatgcgtcatggactgctgtctgcaggctggataaacagacactggttgtgtaactgagtccaaaggcctgagacggtggagttctggtgtccaagggcaggagaagatggatgtgccagccccacaacagagcaaattagcctttcctctgcatttttgtgctacctgggctctcaacagattgaatgagctctgcccacactggggagggtgattcttccttcctcagtttaccaaattgaatgccagtctcttctggaaacaccctcacagacggatgatcaactatctgggcatcctttagcccagtcaagtggacacctagaattaaccatgacaggaggtgacggcccctgccttgcttgcaggtcacccccacggagcagggcatgagggtcctgactcagctggtggccacctacccccagggctttaaggtctggatgggccccatcttccccgtcatccgtttttgccaccccaacatcatccggtctgtcatcaacgcctcaggtaccacctggaatacttggtggtgggtgctatggtgcatttgaggcctgcaagtccctctatccccaagccgtgtgtggcccctgcagtactctggtctctcctttccttctctctcagccatcttcatctttctttcatgtattcactaattcccatctcagcatctcctctctccattgccatctgaccccctgtcctggtgttctgggctgccctggggccccaagagacctcaacccaaggccctgtcctggaggaacccccaagcttaaggaggtggatgtggacagagacatccccaacttcatggggtcaagaaagggccagagggagatggatgacagcccagagaagagcaagttctctgctggggcaggctggaagccttcctggaggaagagttactggagccatgtctggaacaatgagtagggatgtttgaaaggagagtgcagggtgatgcaattgggcatcgttagtgttcaaggccccttgccaggtctagcgtcaccttgcctgtcacaaaggttagaacaatgaggacttgtggctggtggaggatctggactgttatttctgtgatgtccatctctggtgtgggtcaagtccttttaccccatcctgtagtttgtctgccctaagttcattgcttttctgctctaggccctgggaatctccaaaaggagactccagcctagtttggggccctctccttgacccctgtgcttcccttcttggacaggccaggctgagcagggaaacaggcagcatcctacagagaccatggctctggcctcaaaatgctgagtgactctgggctggttcccagctgtctctggttactgaggtctctttcagttgtgagtggtggaaatccaacctggtgtagtctaagcaaagaaagagaatctattgattttaaagtccagggaggatggccttcaggcatggctggatccaggtctcacacagtgttacttcctctcttggctttagctttctccacgccacttttggcttgtcttcctttcttggctttagctttttccacgccacttttgctttcaagacagtctttccctcatgacgtcaacaatgagtcctagaagctcaattctcatgggaaagcccacatttcccccagagttcccagaaaaggcccatgatttacttctcctggcctggatcaccagatcaatttttcacccagtccctgtgtttctgattgcctagtctcggcaggcctgggccttctagagctactgttttgggggcacaaagaagtttgatggttaaggaatcaggccatgggtgcagatagacccagtctcaggcctcaggtttgccatggtctgggactatgggcaaattactttatcatttagagcctcagtctcttcatctggaaaatgggatgaatgagagcccagggaacatggtgtgtggatccacatggggaaagagcttttctgtctgtgtaactgaaggactggagagtcctgcatggaggatgtgaggaggaagcccagtgggggctcagcactgagagggagatgagatgctgcttgaaattctcagggagagggcttccacctcttccctgcagatccttctctctcgcagcctaggagagcatgaattgggtcctgtgtctttctctccagattcacagctcggaggaaggtctcctatacacacaaagcctggcatgcaccttcggtgatatgtgctgctggtgggtggggccctggcacgcaatcgtccgcatcttccaccccacctacatcaagcctgtgctctttgctccaggtagacactgcactggccactccaggtagacactgcactggccacgccttgcccacagctggggtctctgtgctgcctccagcgggtcgcgtgcccatgtgcagacaggaggggctgtggtggagatgccactgcttccatctcccctggacttccatctgtctgacctctgttcctgtttgctcatgtctgggaagtgtctctatggtggctgttatatggtcaagtctgctgtacggctacgtcttgtcacctgtatatttacacctgggtcctggttacacctgaaatatgttatacccggttacatctggtatatcattccaactgaggtcatgtagagctggtcatgtgtggagttcatgtgtggccaaggacatttggggcatgtgaggggctgttttgttcttgtcgcaggtgctgtttgacactgccgttttctcctgctggtcacatctgggccatgtttgggggttgtgtgaggtctgggacccagggtccctaagtgaactgtctgagacattatttgagtcttgtctgaggcatgtgttgtagtatgtttgggtcatacgtgaggaacagtctgggtcacgtgttggctatgtctgggtcgttaaaggtaccatatttatattcaacctggagcctgtatgtggaacacgcttttaaggtcatgttagaccatctcatgtgcatgttagagcataccatctcatgttaggaattgtcatgtattttgtggccatgtcaggacttgtgaacacatgtcagtgtcatgtctcatgtctaggtccatgtcagaagatgccatgtgagaatatgtcagagagtgctgggacagacagggtgtcctaagtccttgtgaaggcattctgtagagtgctgagcgtgttcagggtttgcagaacatgttggatcatgtaggaggcatgtcaaggcatgctggagccctgacatagctcctacgtgccatgttaggcagtgtcattgctgtgctgtgctgccgtagcctggtctggtcttccctcccctcccccatcctgccttcttcctctccccttgaccctcttcttgctatgtggggcttggagggaagaagtgcaaacctcttgctgggagcctccccccacccccaaagttcctccttcacctgcctccatggcccctgattgtcctcatttatgtcagctgccattgtaccaaaggacaaggtcttctacagcttcctgaagccctggctgggtgagtatctgtaggtgaacagggttgggaacaacctggggggccaggggagggagatgcccttgcccatggcccttggctgccctgccaggggatgggctcctgctgagtgctggtgaaaagtggagccgccaccgtcggatgctgacgcctgccttccatttcaacatcctgaagccctatatgaagattttcaatgagagtgtgaacatcatgcatgtgagttatttgaagccaaggtcccagctgcagcctttggttggggggaaccacagacagatctagtctggaattttggctctgctgggtgcctctgggccattgtcttcctctctgagctttggtttcctcatctgtaaaatccctacttaaaagaaggtcaaggtgatgtagtggagtcatgtctctggcgcatagtaggtgcccagaaggtgtctgtttctatgttcgcgtcacccgaaccctgtaaactcaagagggtaatgacaacaattgcataatagctgttgctgataagaaacaacctgaaaactcattggtttaaaccaataaaggtttatgaatcctgataagtctgtgggacagttcgtggattcttctggatgtggatggaagggatcagtcatggtacatgagcagcctggggtcaggtaggcagccttgctggtgttggctgagttctctcacatgtttgggttttggctggcttcagaccgatacagatggcctcagcttagacccctggatgttcctccatctgattctctccctccagaaggagtcccatggtttacaatacagatagggttccagggaataagatgaggcttagcttcattagttatcacctcatcatttttaccacattgtattttgacatcaaaagccaatagtccaacacggaatcaatggcagggggtaaaataggctctgtctattattgggagttgctgaaaaagcacattgcaaagggtgtggatatggggagaagggaagaattggggcgaaggttttgtgaagtgtttagaattttttaactttaaaattgatgttaagctagttactgtttcataaattattctggaagaacaagaaactcctgggtcagagacaaaggatagttttactactcatgacacagagagcagcatgtgttgcttgttagattgcacttcttctccaagcctctcaaatcccatgggctgacacaagtgggcttctataaatgcctgctgacatcatatattgcattacagggaaggggcattaggcttaggaatctgtttttatagcaagcagaagcagcatatccagggggtgtcccttatcctcaaagttattttctgcaaacacaactctgagaaatttttcaagttaagaacatcagcgtgttgcatttgtgacatgcccagaaagggtgctcaggactcatggaggactacctctacaaacctaggatatttttataatcaatttataactgcagatgaggaaacccaacatttattgagaactcacaatatgccagaaaaaatgccatgtgcccattccatgatacgagtatatattgtctaatttgattttaacaactctgcaaaggagagattatgtatttctgccccatggtagatgatgaaactgcaggtctgagagattagggagctaacccaagttcacccagctaatgagtgagcttggcatggtggagcagagtttctaacatgaattatatggctccaaagcacatcatcttaactgttcctgaatatctgacaggtgggatataggggagggtaatgagttgactaatggcacacagagcacagaggacagagctggaacttgaacctaggtctcctgactcccaatcttgggtcttcatctcttaatagtaacagcttttgcttgcaccataacctggtgctcccgggtaaagggtccctggggagaagatgaagaggcttattctggggcgtgcatattgattgttggggttggagagctgctcaagggagcaagggacctgccccagctctgtccccttctctggctaggccaagtggcagctcctggcctcagagggtagtgcccgtctggacatgtttgagcacatcagcctcatgaccttggacagtctgcagaaatgtgtcttcagctttgacagccattgccaggagtaagttcttgcccagggtctgggatcctgggccgtggacacaaagttggtaggtggggggctggggaggactgagcagggaaatcagacaaaccttcttggaggagttgttatacctgatcgttgaaggactggtatgaattttatcttgaggtttccagggactcattaaaagggtttgaactggtgggtgtggtcaaagtgggtctctctcagggactgactgtaatgtagcactaaatggagttaacactgatgcaaagaagctagggtggaagctggaccatggaccagttggaagaggataaagtctgagctttgtggacagcttcaggaaggagaaggggcaagactgtatactgggagggagagagggaataggagcataatgtgcaaactatcctctgggtgcctagctgcatggaggcatctcacagagatgggatgcagggagagataagagagcctggagagtcgatttcatgctgatccccatcctgcatctgaggggccatctgttcctggataccccgtttactgataggaggtagctcctagctgctggtgggaggtgatcctggggcttcaggtgtattaaattgttgcctccctttctgcccttatcctgcaggaagcccagtgaatatattgccgccatcttggagctcagtgcccttgtgacaaaaagacaccagcagatcctcctgtacatagacttcctgtattatctcacccctgatgggcagcgtttccgcagggcctgccgcctggtgcacgacttcacagatgccgtcatccaggagcggcgccgcaccctccctagccagggtgttgatgacttcctccaagccaaggccaaatccaagactttggacttcattgatgtactcctgctgagcaaggtgggcctctctgggatctgaattcaagaagtagaagggagcttcatgtgaaatgtcagatgaaagaatttgaacttgacccagagggcactggggagccatggaaggtgattgaggaagggagggacaggtcagagataggttttggagatagctctgtggactagcacctaccaggggactgctaaatgaaattgtgatgagtctgagatttactctatttataagttaataagctaattggccaccttttaatctatatatctacatctatacctatgtctgggtctatgtttatgtttttgcctatgtctttctgtatctttgtctctgagtttgtgtctctctctatgactatgactatgtctatgtctttgtctttttcattggccatatctgtatgtctttgtctgcatctgtgtcttcatctttgtttatgtttatgcctttgtgctctccctccctccctgccttctttttctttctttctttctttctttctttctttctttctttctttctttctttctttctttctttctttctttctttcttttccttccttccatctttctttctttctttttctttcgttctttctttctttctttctttctctctcttctctttctttctttctttctttctttctttctttctttctttctttctttctttctttctttttctctctctctctttcctttttttgacggagtctcgctctatcacccaggctgcagtgcaatggcatgattttggctcactggtaacccctgcctcccgggttcaagtgattctcctacctcagcctcccgagtagctaggactacaggggcacgccaccatgcctggctaacttttgcatttttagtagagacgaggtttcaccatgttggccaggctggtcttgaactcctgacttcatgatccatccaccttggcctcccaaagtactgggattacaggcgtgagccactgtgccccaccttgtcatgtcttttctatgtctgtgtttatgtctttttctatatctatattttcgttcttgtctatgtctatgtgtctgtgtctatgtctttttcttttctctgtgtttgtgtctttgtctcagtgtatgtctatgtccatgtttttttgtctgtgtctatgattatgtctatgtcaatgctatatctatatctttgtctttttttttttttgagatggagtctcgctgtgtcacccaggctggagtgcagtggtgcgatctcggcttactgcaacctccgcctcctgggttcaaatgattctcctgcctcagcctcccaactagctgggattagaggcacctggctaattttttgtatttttagtacagacggagcttcactatttttagtctcaaactcctgagctcgtgatctgcctgtctcagcctcccaaagtgctgggattacaggtgtgagccactgcacccggccatatttttgtctttgaatttgcctgtgcctgtgtctgtttttgtctgtccatgtttatgtctatgagtatttgtgtctgtgtctatgtccatgtctatgtttatgtgtatttgtgtgtctgtgtttgtgtctaagtctatgactttttccatgtgtttctgtgtctatgtctgtgtgtctatgtctttgtctatgtgtatgtctgttgtgacagaggcattaaatctctggatcagagcagctcatgtcttgcttacggcaatactatcagccagagtaggattgtggcactgactctccattcccaagtcaaattcctccaagggcaatgcgatgttttcccctgtacgtgcagcagactttgtaccctaggaaaggcaccctatattatgagtctcagcacattttctatagagagagagagagaggaagaaagagagagggcaccagctttgtgagagattatgtgctttgttctggatgccatattccatagacttacaactcaaatgtctccagggagataagattcatttaccactgtagaatgtgggcaaatatctttgaagcaatacttaatctctaatttccaagacaaattgccatttaattatcctgtaacccaggttgccagtgatttttttctcagaaagttttcatcaagcagaaacatgaaagcattcatgggtcattgagtcttcccattagggaccaaagaaaaggcaaggaagccagggaggaagcccatggggttggggctctggccatggtgaccaagaagggtctaggagagcaagatgggcttgggtttctcgaaagaggatgaatcttcagagactgtctcagattagactcaagagccctcagaggtactgtgactttttatgggggtgggggtggggggttattgccttctctccaggatgaagatgggaagaagttgtccgatgaggacataagagcagaagctgacacctttatgtttgagggtgagggccccagtgtggggctagagtggggacttggatatctccattccaggaacagggtgggtggacccctcgcacttcccatcccccttcccccatcctccctgaggtcctcaatgcaaggttgctgtacaccctcgggtgctgaagcagcccagagacccaagcctgccttgctgccccccaggccatgacaccacagccagtggtctctcctgggtcctgtaccaccttgcaaagcacccggaataccaggagcgctgtcggcaggaggtgcaagagcttctgaaggaccgtgagcctaaagagattgaatggtgagtgcaggtgctggtgccctgttcctgagcctgtctcattggctctgttccccaggtagggaggggagaaggggttgtttttgttgattctgccactattgcttagtgggaataggagcagaggaccacaggcaggacttagtacccatcctgactgtctgggcaaaggttataggcccttaggacagaaagacctgggcttctgagagaattgttgatgatatgtgaggacagataacgccacttagcatgtgttcagcaaatgaacttcccctccactctcttccttttctccaagaaatatttttttgaatgtcttcacttgttgaatgtttgctcttctgttccctaattcctacccttccatccagtccagggatttataagggagacctgggggtaaaattcatccattcttgtccagaacacctgcatcattcatccatccagtcctcgttcagcaaatactctcatactgcattccaacccccacatctgtgcacagcatctttctgtgctctggagacctgggaaggacccaaccagggatctattttccaggtgctcccagcctggtgggggaactgtccctgggcaggacagtcccagcccacgtgggcagggatggggtttacagtaagggaagcaggactaggggggtatagaaagtgtctcagttgaaagcctgaataatgatcagtagataattgggtacagttggggagcagtgctgtaggtcaagaagaccacctggggtcttcgggggaggaagagagagaggagagagagagagagagagagagagagagagagagagagagagagagagagcagggtcaggacagaaaggaggagaaggggagaaagagggagagactgacttgtggtgagatgataaaactggagatggtagcaggggctggctgtggaagccttggggaaaatgttaatggcttcagttttagcccaagggcaatagggagccatgagaagtgtttgaacagggagggacaagtcacatctgggtaccaggaagatctttctagggctagtgtggagggtgtactggagaggaccagctatagaatgagagcgcagtggggacattctgaggctcaagccaggccaggggctggaggaaggagaggaagcattggagtggacgggtgtcttggactcagtgtcctcccgtccatgcctttgcccagcacagcagtcctgggaagggaagaaacatttttatgcttctaaaataaagaatatttttgcaattttattttttaaaacacatttttattgatgcataatagatgcacatagttttgaaatacatgtgataatctaatacattcatataattgataaagatcaaatcagtgtacttgggatatccattgcctgaaatatttgtcttttctttatgctagaaacataactaacataagcaaactactttctaatgtacagtacatattgtaaactacagtgaacctactgatctatcaagtgctaggttttatttctcctatcaaaactcaaattcgtacccattaatcaacttctccttatccttccctcccctctgccaatctatcttcttttttcatgagatccactttttcagctcccacacgtgagtgagaacatgcgatatttgtctttctgtttttggcttatttacttaccacaatgacctccagttccatccatgttgccacaaatgacaaaatttcagtcttttaaatggctgaatagtattccattgtgtatacacactacattttctttatacattcatctattgatagacacttaagttgattccatattttcgttgttgtgaatagtgctgcaataaatacagaagtacagatgtctcttccatatatttattttctttctttgggatagaaatttcttctctttcttttcagtagtggaatttctgggttatatggcagttctagttttagtttcttgaggaacctctgtgctgttctctgcagtggctgcactaatttatattcccaccaacagtgtgtgtgagttcccctttctccatatcctcaccagcatctatcattgcctgtctttttgataaaagccattttaactgggatgagatgatatctcattgtggttttgatttgcatttctctgactgttagtgacattgagcatttttccatctacctattggccatttgtatgttttattttaagaaatgtctattcagatcttttgcccattttaaaatcagatatttggttacttttcctattgagttgtttgagctgcttatgtattctggttattaatcgcttgtcagatgagtagtttgtgagtattttctgccattctgtgggttgattcttcgctttgttgattgtttcctttgctgtgcagaagcttttttgcttgatataatctcatttctctattggctctgcttttgaggtcttacatagaaagtctttgcccagacccatgtcccggagtataaaaccaagatttcaagcaaaattatgcgtgtagtttaaaaaaaatggtcgaaagactttatgacaaaaatgaagttccttattaagctccaccttagcggtgactacagtcaacagttctctgtgtattcttctagaaaatggctatcccgatgcccacatttatatgaactcacactgtgacttttatttatatgaacacttactgtgcttttctttgtaagtgaaagtccataaaatagacacgggtctgcatattatctctgagatcttttgcttttctcaaaatatacattttggaaaatgagtttgtttttaaatttgttctttgtctttaattgacaagttttaattatatatgtttagaggcacagtatgatgttgtgatatatgtatacaacctgaaattattaaatcaaggtaatgaacaaatccatcacttcatgtgtttatcatttttgtgttgagaacatttgaagtttactttcttagcaatttcaactaatacaatacattgttcactaaaggcaccaggctgggcagcagatctcaaaaacttattcctgttgtctaactgaagcttctaccctttgaccaacatttcacccttctctgtccctcccccacccctggcctctggtaaccaccattctattcctatttctatgagctcaactattttaggtcccaagataagtaagatcatgtgtgtttgtctcttctgcacctggcttacttcacttagcatgagttcctccaggttcttccatgttgtggcaaatgagataattttttcttttttaaaggctaaatgggattccattgtgtatatatatatatatatacaccacatggaaaaacaacattaaattacaaaatgaatgataaaaaagagttcttcttgtaccaaatgagacattacagataagactagggttttccttgacaatcctgccacctgacctaatcctttctcattctccaaaggtgtttctagagccatagatttgtttatctatctatctatctatctatctatctatctatctatctatctatctatctatttctatcatctatcaatgtatctatcattgatctatctatcatctatcaatgtatctatcatctatctctattatctgtctatctatctatcatctatgtatctctgtatctatcatctatgtaactatgtctccatcatctattatctatctctctacttatttatctacctattatctatgtatctatctatatcatctatttatctatctatctatctatctatctatctatctatctatcatccatccatccatgatctatctctccaccatctatgaatcattcatttttataaatatatatccatatgcttcttgctgttttacatgtacatatgtatatatttgtcactttttttcactcaacagggtgccttaatgctatctttttctgagtgctgtatattttattccatattttattcagctcatttctatgttgaagaggacattaaacattttcaattatagtcaatatttccaatttgccttccagagtgtctgtactgatttaccttctagcctgcagtatgtggtgagactagtgatccctatttccttcttttgtgtaactgtatagtattccattgtgtggctgtttatctaaacattttcccattaatgtatatttggcttgtctccaaacttttgctaaactggacatgaagctgtcagcacgtgtgcacagtgaccattccttacatgcataggcatctctgcaggacaaattctctgaagtgcaattgctgaatcaaagaccatttgcactgtataatcattatttttttgagacagtttcactcttgttgcccaggctggagtgcaatggtgtgatctcagcttactgcagtctctgcctcccagattcaagcaattctgcctcagcctcctgagtagctgggattacaggtgcccccccaccatgcctgggtaattttttttgtagagatggggtttcaccatgttggccaggctggtctcgaactcctaacctcaggtgatctgcctgcctcggtctcccaaagtgctgggattacaggcatgagccaccatacaatatgactgcaaatcctttactattagctgagttttatggcacaaactttcccataactttaccaatagtactattgtattattgaattttaaatcttggccaattttcatatttcttcttttgatggacatttaaaaaaagtaagagtgaggctgaacatcttttgcacgtgttgatgttatttgctttctttttatggaactggtattcttattatttttcctctttttctttggaccctttaaaagtatttacttttaagaatgtgtattaagattgatttttttctgcctagtgttgcaaaatattgccttttaacttttggagggtacttttgattaatttttatgacgttaagtaggtccacatttttctttcacagctgtaaaatccatcaacttcccaggattttgtttagggtgggtgggggcccctttaccaaatgtgaagttttctcttattctcatgtctttttctgagctctttatgctgttccatgggtctattttcttgtttctgcaacagtgtcacactgtttttattcctgcgactttgtaacaattcttttaaaaagtttatttcgttacagggagaaaaggtctcacttgcaaacagagagaagctggagagttgtgtctttgctcccttgataaggattggggctggggtgtttccttagggacgacctggcccagctgcccttcctgaccatgtgcattaaggagagcctgaggctgcatcccccagtccctgccgtctctcgctgctgcacccaagacattgtgctcccagacggccgggtcatccccaaaggtgccacagcctcagggggaggagcctcctgggtaggaagaggggcccctcaggcagggagcattgtcctgactgcccccttctctcccacaggcattatctgcctcatcagtgtttttggaacccatcacaacccagccgtgtggccggaccctgaggtgcgggccccccgtctctgtttttgtccattccaaggctcctagaggagggggcagggttttgatcaggagaatccaacatcacctccctccaagacacacaccactgtctctccaaggctggcggactgggagaccccacccggcaacccttcttggtctcgcctccaggtctatgacccctttcgctttgacccaaagaacatcaaggagaggtcacctctggcttttattcccttctcagcagggcccaggtaagagcggcctgtgtttgaggcggggacggggagataggtgcaggggtctgggcatgacagtggggaaaagggggacattgtagacggtccgagttccagctctccttccctcacctcctctggagtttatgggaaaaggcccacagagtaggattgggttggtcctagaaggatccctagtgagctcagagctccctcctaccccaccttggtctaggctggggggttggagctcggctaggctcgcaggatatgcaagcccacatggggatccaggcacggatacccccttctctgttcctcaaactgctctaggtggggttgggtgtcccaggccaggttaccggcttgatggggccaggatggggcacctgggtgcagtcagagtttccacctccctccccaaggaactgcatcgggcaggcgttcgcgatggcggagatgaaggtggtcctggggctcacgctgctgcgcttccgcgtcctgcctgaccacaccgagccccgcaggaagccggagctggtcctgcgcgcagagggcggactttggctgcgggtggagcccctgagctgagttctgcagagacccactctgaccccactaaaatgacccctgattcatcaaaagtgaggcctagaattaccctaagaccctgttccacagtcctgtattccatcctagatatctactcaaaataattgagacaagtgttcaaacagaaagacgcttgtgcgtgaatgttcatggcagccctattcacagtagccaaacgatgaaaacaaccccaagctatatattaccagatgaaaggataaacaaaatatggtccatccatacaatggagtattacacagccataaaaaggaatgaagcagtgatccccactacactgtggatgaaccttgaatgcatgatactgaatgaaagacatcagatgcaaaaggtcacatagtgtactgtccttttatatgaaatttccagaacaggccaatctgaagagatgtatagtggattggtggctttcagcagctgtggggaggtgggactgaggagcgactgctaatcaggatggggtttcctcctgggatggtgaaaatgttccggacctagatagtgatgaaggtagcacgacactgtgagtgcactaaatgctattgaattggacactttagaatggttgaaatagtgatttttatgtgaattctacctaaacatgctattacagctcatatatactttttccatctggattcttcacaaaagaatatgttgtgagcatctttccatgatattaaatcatcttaggaaacattattttgtgttcttcaaaatgtgcatgttaagtattcaaatcagtcttaaatttttaaaaatatgtaattttagaaaataatttaaaaggttttgtttcagtttgtaagatttcttttctggcactttaatggcttgaggtatcattatcagttacaaattgagttattcttcatcaaatgacttttggagtagagattttatttttatagcaatagatgcacagatattcctgtaagatacaggtgtggttagacacttttctagaacaggcatgccctgcaaactccacagacactgactgtttttgtcctattaagaagtagaccactgagaagggagaaggtgacattttagctttcccaggtaaaagtggttttcatcctcacaccaattttatggactggacgttaactctcttgctcaaggtcactctgagtggaagagtggggataaatctggttcgtttggcatcagaggccatgacttttcctaccacagaagtaattttcaaagtaagtctctgccctaggcacatcagatcacctggggaccactccagagtgagtagacaagactttgacaggggtgcctaatttttttttttttttgagatggagtctcgctctgttgcccaggctggagtgcagtggcatgatctcagttcactgcaacctccgcctcctgcgttcaagtgattgtcctgtctcagcctcccaagtagctgggattacaggcacccaccaccacatccagctaattgttgtatttttaatagaggcggggtttcgccatgttgcactggctggtgttgaactcctaacctcaggtgatccacccgcctcggcctcccaaagtgctgggattacaggcccggtccagtttgatagtttgttatcatgttatacgtacacttagaataatgatccagccatctcattctaacagcaatgagaacttaggctcccctctctactaaaatacaaaagttagctggtcatggtggtgcgggcctgtaatcccagctactcgggaggctgatgcgggagaatcacttgaaacccacaggcggaggttgcagtgagctgaggtggtgccactacgctccagcctgggggagggggacatagcgagactcggtctcaaaaacaaaacaaaacaaaacaaaacaaaacaaaaacaaaacaaaacaaaacaaaacactgccaaactgtttccaaagcatctgcatcgtgtttaatttccataagtaacgtatgagaattctaggtcctccaaataattagcagtccttcgtagtgtcagtttttgtttcagccttccttatgggtatgctgtggcatatccctgagattttaattcgcattttccagtgactaagggtgttgaaccactcgtgccttcctgtgcctatttgacactcctatattttctttggtgaagtgtctgttcaatcatctgctcattaaattttccttcggttgtttgccttcttattgttggattttgagagttctatgtacaagtcctttgtcagtcgtgtgatttgcaagtcttcttcctagtctctgaagtttctttctttcatagagcaaacgttttaaatttttatgaagtaagacttctcagttttatttttggtgaattatgtttatactgccatatataggaactctttgcttaactggaggtcatggagattttctcctacattttcttttaaaagttttatagtttcagagtttacatgtaattccataatctccatttagttaaattttgtatggggtgtgaactgtggtttgactgttttcttgtatatggatatccaattgtttcacacaatttttttgaaaagaatatccttggcagggcacggtagctcacacctgtaatcccagcactttaggaggtcaaggtgggcagatcatgaggtcaggagtttgagaccagcctggccaatatggtgaaaccacgtctctattaaaaatagaaaaattagccaggcgtggtggtgtgtgcctgtattcacagctgcttggatggctgaggcaggagaatcgcttgaacccaggagtcagaggtttcagtgagccgagattgtgccactgcactccagcctgggtgaaagagctagattctctctctcaaaaaaaaaaaaaaaaaaaaggaaagaaagaaagaaaagaaaagaaaatcctttttgctttaacttgccttgcaggtttgtagaaaactcaattgttgaaatttgggtggatatatttctggattttctattctattccatgttggaccaataccacactgccctagtcactgttgcattatagtatatctttaaaggagtaatgggaatccttcaactacattttttccccaataatttttggctattctgcttcctttgtgtttctatgtaaattttatcatcagtgtgtctatttctacaaatagtcctgatagggtttgaattgggatttctgtgaatctatagatcaatctgaggagacttaataatgatattgattctcccaattcatgaatatagtatacccctgtatttatttgttttcttgaatttcttttatcattgttttgtagttttcaccatgacagtcttgcacatattttgttaaatgtacagctgagaatttaattttttctggtgtacaatgctaataaaatggtgctttaaaagatgtgttcttcagttgtttattgttaatacatggtagaagtttgtatcctgtttttgtaaaaggccacatagtcaatattttaggtcttgcatgccctatctggtttcttcttctctttctccttcttctccttgtgccaccttttaaaatataaaaaccattcttggctcataggccatacatatacagtacacaggccatatttgatccatagaccatggtttgctgaccctgggatataggaatatggttgatttttgtatattgtctgtatattggatcattcttattggaatacaataatgctgttatttcctcagtcttaaaacacttcccctcttggcctcattttcacaccagtcgatgctccatttctttgccccactatgcagcaaactccttcaaagagtgacccacatgtgggtgtcaaatgtctcctctcccactccaaacaggctttgagaatcctctcaggggagtgagggtttataaatgagacataaacccacaggactctgctacatctgtgtatgtaattctcaaaacacactcaggcctggtcttgttactggctgctatgagacctccatcttctcctgagtgagtgtgaaggaggcactctctgctggacggtttggggacaactggccctatagagtctttattagtttcattgtatgtatgtgagagagcaagagaagacagagtgtgtgggtatgtgactctatgtgtttgtgtgactgtgtgcagtgtcgtaacagcacatgtgtgtgcgtgcatacaggcgcatatgtgaggcattctgactggtgttaggtggcgtttcattgtggttttgatttgcatttttatatgatcagtgatgttgaatgtcaggacatgttaagatatattggagctatgtcacatgttccggctttatgtcaggagatggtagaaagtgccaagaaagacgaagtatactaggtccctgtagaggcattttgtagtgttgagctatgctcaggttttgcagaacatgttagactattttggagccatgtcaagtcgtactgtagcatgctgtgccatgttaggctgtcattgctgcactgtgctgctatagcctggtctagtctcctctctcctcccacatcctctcttcttcctctctctttggccctcttcctgctatgtggggcttggaggggagaagtgcaaacctctagctgggagccttcccccaaccccaaagtccctcctttacccacctccatggcccctgattgtccccattcatgtcagccaccattgcaccaaaggacaaggtcttctacagcttcctgaagccctggctgggggagtatctgcaggtgaacagggttgggaaataagttgggggaccaggggaggaagatgaccttgcccatggcccttggctgccctgctaagggatgggttcctgctgagtgctggtgacaagtggagctgccaccgtgggatgctgatgcctgccttccatttcaacatcctgaagccctatatgaagattttcgatgagagtgtgaacatcatgcacgtgagttatttgaagctaaggtcctagctgcagacttggggtggagggaccacagacagatctggtgtagaattttggctctgctgggtggcattgggccattgttcttcctctctgatccctagttttgttttgtttttttttaatctgtaaaatgggtataataatccctacttaaaaggtggtcaaggtgatgtaatggagtcatgtccctggtgcatagtaggtgcccagaaggtgtctgtttctatgattctgtcacccaagccctataaaatcaagagggtcatgacgacaattgcacagtagctgttgctgataagaaaccacttgaaaactcattggtttaaaacaataaaggtttatgaatgttaataagtctatgggacagttggcaggtccttctctatgtggaagggatcagtcatggtacatgagcaacctggagtcaggtaggcagccttgcaggtgttggctgagttctctcaatgtttgggttttggctggcttcagactgatacagatggcctcagctgggacccctggatgttcctccatgtgattctctccttccagaaggcaccccgtggttcacaatgcaggcaggcaggtttccacggagtggcacgaggcttagcttcattagttattacctcatcattttcaccacattgcatttcatcattgaaagccataatcccagcacacaatcagaaaaggagaggaggagtaaaataggctctgtctcttaaggaaagtcgctaaaaaatcacattgcaaagcgtgtggatatgggggtaagtgaagaattggggcgagggttttgtgaagtctccaggttttattaaacttgcaaattgataagttagcttgttactatttcatggattctgccagaagacaggagactcctgggtcagaggcaaagggtggtttattactcatggcacagcaaggagtatgtgtttcctgtcagattgcattgtttctccaggatacccaaatcccttcgggtgacattgttgggcttttataaatgcctgctcaggtagtatgttgcattacagggaaggagcattaggcttagggaatagcaagcaaagtaagcctgatacgggtccaaagggagtcattaccttattcttgaacactgttctctgcacacacaactctcagaaatggctgaagttaagaactcagtgttttgcatttttagcatacccaaaagggatactcagggctcatggaggacttcctgtcccaacatagagatatttttgtaatcaatttataacaaggcagataaggaaagccaacatttattgaaccctcactatatgccataaacaatgccatgtgcccatcccatggtatgagtgtatattgactgatttgatgttcactgttctttgaaggagatatttttgcctcactgtagaggatgaagctgtgggtctgagagattagggagcttgcccaagttcacccagctaataagtgagcttggagtagtgaaacagggtttctaaccttgtttatgtggcaccaaggcaatcatctcaactgttcctcaagatttgacaggtagaacatagggaaggataaggagttcgttcaccaaggacattcagagctggaacttgaacccaggtctcctgactcccagtcttgcatctccatctcttaatattaacaacttttactctcactgcaatttggttacccctggggagggattcttggggagaaaatgaagaggctggaatagtgtgccttggtggttgggtttgggaggggctcaaggaagccagggacaagcaccagctctgtccccatctctggctaggccaagtggcacctcttgaccttggagcacaatgcctgtctcgacatgtttgagcacatgaacctcatgaccttggatagtctgcagaaatgtgtcttcagctttgacagccaatgtcaggagtgagtctttgcccagtggctgggaatttgagccatggacccaaaggagtaggctgggggagagagaactgatgagggcaagcagaagtgcctacctggaggagttgtgtcacagtctttgaatgactggtataaacattatcatgaggtttccagggagatattgaaggggtttgagctaatgggcatggtcagagctgagttctgtgagggactgactgtagtgtggacactaaatggagttgacattggatgcagggaggctagggtagggtagagacagttggaagaggatgaggtctgatctttgtgaacagtttcaggaaggagaaggggcaggattatataccgggggcaggggagagagaataaatgcatgatgttcaagttatgctctgggtgcctaggggcatgaaggcatctcacagagatgggatgcagggagataagggcttggagaatcaatctcatagctgaccccctctctgtatgtgtggggtcatctgtttctgtatactctgtttcctgataggaggtagctcctagctgctgatgggaggtgcttctggggcttcagacatgttaagttgttgcctccctttctgcccttatccttcaggaagcccagtgaatatattgcctctgtcttggagctcagttcccttgtggcaaaaagaaaccagcagatcctcctgcacatggacttcctgtattatctcacccatgatgggcggcacttccacagggcctgccgcctggggcatgactttgcagacgctgccatccaggagaaacgccacaccctccctagccagggtgttgatgacttcctccaagccaaagccaagtccaagaccttggacttcattgatgtgctcctgattagcaaagtgggcttctctgagatttgaattcaagaagcagaagggagcttaatgtcaaatatcagatcaaagaacttagacttgatccagagggcactggggagtcatggcaggtgcttgaggaagggagagacaggtcagagataggttttagagatgactttgctgaatgcacctagcaggggactgctagatgtgaaactgacaagtataagattttactctatttatgcattaataagctagtctatataagtattaatatatctatatctatatctatatctatatctatatctatatctaatgtctaggtcattgtccatgcctgaatttgtgtctgtgtccatgactatgtctgtgtctttgtctttgtcattgcgagtgtctgtctttgtatctgcttctttttctttcgttgtgtctatatctatgtctttgtgtcttttctatgtctgtgtctgtcttttctttgtctatatctttgtcaatgtctatgtttatgtctttgtgtatgtctgtttatatctttatgtatgtcttcatctcagtctttatgtctatgtttagtgtcttttctgtgtcaatgtctatatctagatctatgtgtctttgttcatgtcatatctgtgtatctatgtctttgtctttttctgtgcctgtgtctttgtctatgtctatgtatatttctgtgtctctttgtctatgtgtatgtgtatgtgtatgtgtatgtctatgtctgtgtctatctctttctctttgtcgatgtctgtctatgtatttatctacatctttgtcaatgtctgtctttgtctatgtctgtgcctatgtctatgtcatgtttatgcctttgtatatgctcatgtctatatctttctctatgtctgtgtctgtctttgtctaattcttggtctttgtcaatgtctacatctttgtctatgtctgtgtctttgtctgtttcttttctttttctctttctttcttttttttttttttttgagaaagattcttgctctgttgccaggctggagtgcatgcaatggcatgatctcggctcactgcaacccctgcctcctgggttcaagtgattctgcttcagcctcctgagtagctgggactacgagtgcccgccaccacgcccagctaatttttgtatttttagtagagatgggatttcaccatgttggccagggtgcgctagatcttctgaccttgtgatctgcctgccttgacctcccaaagtgcagggattacaggagtgagccacggtgcccagcgtctttgtctgtttctatttatgtctacatctacatctttccctacgtttatgactttgcctatgtctatacctttgtctatgtctatatctttgtctatatttgtgtctgtgtctatgtctatatctatgtctttctctatgtttatgtctatgtctttttctgtccatgactttttctattgtgacagatgtctattgtaacaagtgcattgaacacctggatcacagcagcccatttattgctcacagtgacactagcagccggagtaggattgtagcattggctttcattcccaaatcacatttctccaagagcaatgcaatgtttttatctgtatgtggaacagtgtttgcgccctaggagaggggctccacattacgagtcttggcacattttctatttattttctcgacagagagagagagagagagagagagagagcgagagcaagagagagtgctttattctgaagcataaaccaattctctccagtgagatgtaatagtctgtagacttacaacacaaatgtcttcaggggaaataaataagattgtctgcatttaccacactggaatgtgagtatacatctttggagcaatacttaatctctaacttccaaggcgaattgttatttaattatcctgtaagctcatttgccagtaactttttctcagaaagttctcaacatgtagaaacatgaaaatattcatgtgtcgttgattcttcccaccagggacaaaagaagaaggaaggaagccagtgaggaagattgcatggtgtgggctctggtgatggtgaccaagagacatctaggagtgcaagctgggcttgggtttctggaaagaggatggatcttcagagtttatttcatgttagactgaggagtcctcagagcttgtgtggttttcaagggtgtttttccttctctccaggatgaagatgggaaggagttgtctgatgaggacataagagtgtaggctgacaccttcatgtttgagggagaggatcccagtgaggaccaagatgtctcatcccagggacgtggtgggtggaccctggatggcttcacccttcccatcccccttcccccatcctctctgaggccctcaatccatgggtgctgtccaccctgttgtgctgaagcagcccagagacccaagactgcctggctgcccctcaggctatgacaccaggaccagtggtctctcctgggtccagtacaaccttgcaatgcacccagaatgccaggagcgctgcgggcaggaaaggcaagagtttctgaaggtctgggagcctaaagagattgaatggtgagtgcaggtgctggtggctgttcctgagctccatgactcatgttggcaatgccgatggctctgctccccaggtggggatgggaggaggagttgtttttgtctattctgctactattgcttagtgggagtaggagtagaggatgacaggcaaggcttaatacccagtctggctatcaggggagaagttgcaggctgtttggacagcaaagatctgctctgctgagagaattggtgacaacatgtgaggggagatgatgccacttaacacatgtttagtagatgaacttcccctttactcccttctttttatccctgaaatgtcattttgcatgcataatctgttttcgttattgcaacaaccttgtgaggtgctgctgctgaaacgcccatttacggacgtgaaggagcacagcctggtggtgaggggggcacaatgtgaggctgggtgggtggtctgggtgcacagcccagatccaccagctctatgactgtgggtagtcactcaaatattttccagactggatttctcatttgtaaaatggaaaaacaaaatggttaatatagttaaaagacttaaaacaggctccatgactcatgttggcaatgtcgatggccgccattcctgctctaacctgcttgcccatcccaggcacacaggaggtctgcagtgagctgagcccctctagccactgggggcactttcttctgtgtccctaggaccctgcctgttcatcaacccctggctttgctccctgagcctaagaaggatggaaccaccagcaggtgaggtctgtccttgcagaggtagtggggattttgggggatgcaccctacgcgaatgaagctgtaggaccaggtgcctgaatcccctggctgattgagctggcaggggtggtggggtgggggtggtctaggggctccccagtacccagccagtgtcaggagtactgtcttccccaccctcctgctcagcagttctgctaggagccccctccttcaagcgcccccctcacctgagtccaccccacaggacaattcaggacaggatctagggagggccaggaggggagccctggatctgttgggaggagaatcctgcatgtgggagaaggagccaggtgctgatccaagggcctcaagatatttcccctttggggctatcacactgcctgagattactccattataaatgtccctatattaatatggcattgacactaaagaatgggggtggagcagcatggcagagggaacggatttggacttgagggtctcatagtcttgagttcctatgagctctgcaacttggactagaggcctgccctctctgagcctcagtttgcttttgtgttaaatggacaccttctctcctctggatgccatcactcaggtctcttcaacaatgcccagggttctggcctagggagctgttgggagggtggtgggacagctttgggcactgtgatgcaggtgagcatctgatacaagcaggtgcacgttatatagagcacctggcacatagtaggtgcaccttatgtagagcacctggcacacagtaggtgtactttatgtggcgtacctagcacatagtaggtacactttatgcggcatacctggcacacagtaggtgctctttatgtagcatatctggcacacaataaggcacactttatatagtgtacctggcacacagtatgtgtgctttatgtcaagtatgttgcaccgagtagttttactttatgtaggggacctaacacacgggagaagcattttatgtggaacatctggcacacagtaggtgtgctttatttagagcacctggcacacagcaagcatggtttatataaagggccagggactcaagatacaggatttgtgaagggctcccagcatacagtagacagtatttatgtggagctcctggcacacagtaggtgcactatatgtagaatagccagcacacagtagacaagatttatgtagattacttgatgcagagtaggtgcgctttctgtgggtcaccaggtacgtagtacacatgctcaatgtggagcacctgacacacagtaggtatgctttatatacagcacatggcacagagtaggcacgctttatatgaagtactctgcataaagtaagcttacattatgtacagcatgctgcacacagtaggtgagctttatgtggcatacctggcacatagtagacagaatttatgtacagtatctgatacacagtaagtgcactttatatagtgaaactggcacacagtaggtgcacacagtagtgctttccgtacagtctttcgcatggagtagagacaggcacacagcagctcaagtgctagttgtcatccccttcccttcagtccctctttttggagctcccttttcttaggagccttcctccgtcgccctctaaggcctcatctgacatcccatttcccagatgggaagcctgagcccaggatggccacactgcccacagtcagagaaaggacagggcagaacaaggactccactcgggatccccttgctctgccctcccctgcctggaccccgtcagctcaaggcccctctcagcctcatcccctgtgcctccgctctgtcctcctaagctgagcccagcttctaggtttgctcctccagctgggctctttatccccagaatctgacgaaggtaatcctcagcggggttggggctggattctttcttcctgcttcaagcagtcaggcctcaactcaggccctgggctgccaggaggcaggacttgaactcttgccaggctgtgaagccagagatgagaggcttctgtctctgaatctcctaagtctgcaccaagatgtagtgcctgacatcctccccgcccatgtttggagaggagcccagatgatctgggacaagggttggcctggcccagctcagctggctgccaactgtcatgataagtatatgcttttatctgaacacccttgtcttggaagggcagggtggaggtaaacttggggttcagagtcccctctaaccaccctccaacttcccctgcaaactcccaagaaggtactgagacctgagaattcagtgctcgtgctggggcaccctgagctgcacccagtgggcccaaccccaggttttggctggctgcccaggcacggaagacacacccaggctgtggggattggctgcctcagcccagcccagcccagccccgcctcctacggccttccctagatcaggggccagggccaaagacctcccagcagaagaggagaagaggttgtgtgggacaagctgctcccgacagaaggtaccaggctgggggtggcagggctggaaggtcctggcctgggatgaagaggggactgcctaaggctggggtggctccaagatgctggcatgggaaactgggggtttcctggtaactggactcctagcaaactcccaaggattcaggtggggcccttctggactctaatcggcccatctctttccctttctgtgtggttaccaggttactggaggccacttagttgttggttttggttgggactttctggacttcagatctcagccctcgtttactcacccctgagccctccctgccctgcccccagcagttcctgacttcgcccctatacactgtccccggagctcttccctgggcctcaggtcctcaccctgcatcccctctgccctgcaggatgtcgctgctgagcctgccctggctgggcctcagaccggtggcaacgtccccatggctactcctgctgctggttgtgggctcctggctactcgcccgcatcctggcttggacctatgccttctataacaactgccgccggctccagtgtttcccacagcccccaaaacggaactggttttggggtcacctgggcctggtgagtgtgacagcaaaatgtgtctggggtctcagggtggatggacttccagaggagcaggaatggggctcagtgagctaggtattgatggtggctggggtctgcgaccccagagaagcaagagagatggctcactcattcctctgctaactcactcattcctctacccactcactcctctacccactcactcactcctctacccactcactcactcctctacccactcactcattcctctacccactcactcattcctctacccactcactcctctacccactcactcactcctctacccactcactcactcctctcctcactcactcattcctctcctcactcactcattcctctacccactcactcactcctttcctcactcactcactcctctcctcactcactcattcctctcctcactcactcattcctctcctcactcactcattcctctacccactcactcactcctctacccactcactcaatcctctacccactcactcactcctctacccactcacacattgccctcctcactcactcattcctctcctcactcactcattcccctcctcactcattcctctcctcactcactcattcctctacccactcactcattcctctcctcactcactcattcctctacccactcactcattcctctcctcactcactcattcctctcctcactcgcgcattcctctcattcgcgcattcctctcattcactcattcctctcctcactcactcattcctctcctcactcttattcgtctgctcactcactcattcctctgctcactcattcctctcctcattcactccttcccctcatcactcactcattcctctgcccactcactcattcctctacccattcacttattcctctatccactcactttttgctctccccactcactcattcctctcctcactcactcattcctctcctcattcactgattcctctacccaccgactcattcctttcctcattcattcattcctctgcagttccatgccaaacctttctcacctccctgtcctcccacctcagcctgcttggatccttttcctgcctgtcttccctaccgtagtgcccctcccagaggctcctgtatggttgtggggtgcacagagcagggctctcctggcattcccaccttctccactgctggacttgaagccttctgagccccgatagacaggctgctccctgcatggcccatttgcttgtatctgcccatctctgggctgctgctttcccgcaggaattatctctgacttccttccccacggagggacacagctggaccagaagagaagtgcaggcagtctcccacaccctctccttccagggacaatgtgctcttccccagtaagatgtcccagtgagccctgtagcccaacctggatataatttggccactcccttcccctttcagaagccgtccttggtactcccaaacctttccctccgactgggaccggccctcccctttgggggatgtggcctctgtctgctcacttacaaaaggcaggattgatcggtgtgtccacaggtgcacaggaggcactagcacagaacctggcataagtgaggctctcctaggtgggagctgccatcctgatggacattagagtcacctctgctcccctggaggctgctgagaatggagggccctcaggacgcaggccctttgtctgtgggaggaaccagtgcccatgtggaccaaccaggacacaaaaggatatggcaaccagctctagggatatgtcctgaggccacactgctgcccacaaacctccttccatggggaccttcccatatagcaatccccagattgaaatcaatccaggatgagaaaacacatcctcttgagcagacagcttgtcttctctctctgctttggtatttacccttggatcttggggacagctccaagagagaaggagcagaagtcagcagaaacccactgcagctgctgagaatccagacacgctgctcactgcagaggctgcaccacatccggtggctgtggggggacttgctgtggcttcatctagggaggtgcattagtcagggttctccctagaaacggaatctccttagaaacagatagggtgtttcttcttatctctaatgcatgtatgtatggagacagaaagagatagagagataagaatttattatgggaattggataatgtgatgatggaggccaagaagtcccatgatatatcatctgcaagccagaaaccagggacactggtggtgtaaattcagcctgagtccagaaaggcctgagtccctggagttctgagggcaggagaagacggatatcccagcagcagaagagagagcaagttcttcctttcctctgccttttgtcctgttcatgccctcaatggattggatggggtctggcgtctcagggtgggtggacttccagaggggtgggacttccagtaggggttcagggagctgtgtattgatggtggctggggtctgggaacccagagaaccaagggagacggctcactcattcctctcctcacttactcattcctgtgcccattcactcattcctctcctcactcactcattctaataccaactcactcattcctctcctcactcactcattcctctcctcactcactcattcctgtgcccattcactcattcctctcctcactcactcattcctctcctcattcagtcattcctgtcctcactcactcattccttttctcactcattcattcctctcctcacccactcattcctctgcccactcactcattcatatcctcactcactcattcctctacccacactcattcctctcctcactaattccaataccaactcactcattcctctcctcacttactcattcctctatccattcactcattcctctcctcactcactcattcctctgctcacttagtcattcctctcctcactcaactcattcctcactcactcattcctctcctcactcactcattcccctcctcactcactcatttctctcctcactcattcattcctttacccactcactcattcctctacccactcactcattcctctcctcactcattcccttcctcccattcctttacccactcactcattcctctcctcactcactcattcctctcctcacttactcattcctctccccactcactcattcctctcctcactcactcattcctgtgcccattcactcattcctctcctcactcactcattccaataccaactcactcattcctctcctcactcactcattcctcccctcattcagtcattcctgtcctcactcactcattcctctcctcactcactcattcctctgctcactcactcattcatatcctcactcactcattcctctacccacactcattcctctcctcactaattccaataccaactcactcattcctctcctcacttactcattcctctacccattcactcattcctctcctcactcactcattcctctgctcacttagtcattcctctcctcactcaactcattcctctgctcacttagtcattcctctcctcactcaactcattcctcactcactcattcctgtcctcactcactcattcctctgctcactctctcattcccctcctcactcactcatttctctcctcactcattcattcctttacccactcactcattcctctacccactcactcattcctctcctcactcattcccctcctcccattcctttacccactcactcattcctctcctcactcgctcattcctctcctcactcactcgttcctctcctcactcgctcattcctctcctcactcactcgttcctctcctcactcactcattcctctcctcacttactcattcctctcctcactcactcattcctctcctcactcactcattcctctcctccctcacttattcctctacccacacactcattcctctcctcactcactcattcctctacccatgcactcattcttctcctcactcattccttcctctcctcactcactcattcttctgctcgctcactcactcattcctctgctcactcttattcttctcctcactcattcctctcctcactcactcattcctctcctcactcactcattcctctacccatgcactcattcctctccttactcactcattcctctcctcactcactcattcctctcctcactcactcattcctctcctcactcactcattcctctcctcactcactccttcctctccacactcactcattcctctcctcactcactcattcctttcctcactcactcattcctctgcactactatttccatcctgtttaccttcaaatgctaatctcttctcaaacaccctcacagacacacacagcaataatgtttgactggctatctgggcatcccttagcccagtctagtggacacctaaaattaaccatcacaggaagtgacagcccttgacttgctttcagatcactcctacagaggagggcttgaagaactcgacccagatgtcggccacctattcccagggctttacggtatggctgggtcccatcatccccttcatcgttttatgccaccctgacaccatccggtctatcaccaatgcctcaggtacccatgcagagcttgtggtggtgggtgccagaccaagcttctgtgtggtctctgcagtacccacgtccctccttgagtactcgtgcccctcattgagacttccttctcaatgtcttctccctccattgccatctgctccctgtcttggtgttctgggcaccactggggctccaagaggcctcaattcagggccctttctggaaggaacccccatgcttaaggacacgggtctagacagagacatttccagcctcatagggtcaggaatgggcaagagagagatgggtatgacaacacagagaactgggtgtctgctggggcaggctggaatgtttcctggaggaagagttgttggagctatgtctagaccaataagtaggattttttaagtgtggggcaggatgatgcagtgggcatcattggtatttggggtcccagccagtccttgcaccagccttgcccatccctcagtccaaagcggtaggaggatttgtggctggtggagaatctgggctgctatttatgtgacatccacctatgatgggtcagttccttctacctcatcctatcactcatccaccctaagtttcctgctctcctcctatgggcttcaggattctccaataggagaacccacaccagctgcttgacctccccttgctctctgctcttctcatccttggacacaccaggctgagctagggaagtggcagcatcccacaaaatctatggctctgacccccaaatccttagtgactctgtgcaggtcaccagctctctggctgctgaggtctctttcagttgtgagtgatggaaactcaacttcgtgtgctctaagcaaataaagagagtcaaaggagtgtaaatttcagggagggtggtcttcaggcatggctgaatccaggtgtcaatgaacattatcagggatctgtctccttttcttaatttcaccatttctctgcatcactttttcttttaaggcagccgttctcttatctgtcaaccatgggtcctagcagctcagttcttgtccgaaagctcaccttacccccaggggtcccataaatagccgcctatagtttcaatattatacctggttatatcttttctgtttaacctgggatcatatggagaagtcatcatgtgtgtggctcagctgtggtcgaggacacttggggcatgtcagagactttctggttcttctctgacatgtgatttgaaattgtcttttctcctccttgtcatctcttggccatgtttgtagcttgtccaaggtctgggagctagggtctctttggaattgtcagagttattattttagtctccctgagccaggtttcggaatccattctaatcacgcttgaagaaaactcttggttccacctgggacatgtctgggacatttaagaaatcacatttaaaccctatctggggcctgtctgtggggtacacagaggtcatgtcagactatctcaggtccatgtcaggagatgacagagagtgctatggcagacagggtgtccgaggtcctttaaaggtattttgtagagtgtggagctgtgttcagttgttgcagaacatgttgggatatataggagccatgtcaaggcgtgctggggtgtgctatgacctgttaggttgtgtcatagctttactgtgctgttgcagcctgggctggtccttcttcctctatcctcccttcgtcctttgcccttggcccccttcctgctatgctgggcatggagtggggaaagtgctggtaggcagccttgccctatacctgaagttcctctcttgccctctacatggcccctgatggtcctcgttcatgtcagctgccattgcacccaaggataatctcttcatcaggttcctgaagccctggctgggtgagtacctgcaggtgaaaggggttggggacaaccttgcggggagggtaggggaagtgctgctcttgcccactgtccttggctgccctactaggagaagggatactgctgagtggcggtgacaagtggagccgccaccgtcggatgctgacgcccgccttccatttcaacatcctgaagtcctatataacgatcttcaacaagagtgcaaacatcatgcttgtgagtcccttgaagtctgggtcccagatggagtcttggggtggagggaccatggacacatctggtctggaattttggctcttctgggtggcactgggccattgctcttcctctctgagccttggtttcctcatctgtaaaatggggatgataatccctacttgaaaggtcatttacttggcacacagtaggttctcagaaggtgtcagtttctgtgtttttctcacagaatccctgtaaactcaagagagtaaaaatgaagattgtgtagtagtcattgctgattataaaccacttcagaactcattggcttagagccataagggtttacaattgctaacgagtctgtgagacagctggccagttcttctggatgtggaagggatcactcttggcacatgagcagctgtgggtcggggggcagctttgctgatcctggctcagttcattcacgtttggggcttcagtaccttcagactcatctgggatgggctcagctgtgacacctggactttcccccatgtgattctctgcctccagaaggcaccctgttgttcacatggcagagactgggctccgagaaactgagaggaggctgcaatgtctgtggacattgtctctgcaatacttcaaagttcaaccaggtttgagtctattagagttattacatcatcatttcaccacattgtactggccaaagaaagtcgaaagtcaaaagtccagtacagactcaaaggggtgtaaaatagaacgcatctcttaatgggagttgctgaaaaattactgtggaaagggtacgaatacagggagaagtgaagaattgggggtcaggattttgtgaagtgtctaggatttgttttaaatatgcaaactgataagttagcttgttactgtctcatgcattctaacagattcctgggtcagagacaaagggtagttgattactcatggcacaataagcaacatgtacttcttgttggtttgtatcctttttctgagtcaacctaaattccatgggggtgacactggtgggcctctacattagcctgctcatgcagtacattgcatgacatacaatgggcattaggcttagggaatctactttaatagtggcagaaacaagcctgatattggtccaggaggagtcattgccttatctctccaggtggttatctgcaaatacaactctgagaaatggctcaggtaagaacatcacagtcttgcattggtggcatacgcagcaaggatgctcagggctgatgaagaagtgcctcttccaacacagggatatttttgaaatgaatttattacaatggagatgaataaagcaaacatttactcatcatatgcctgagaaaatgtcatgtcccaatgccaggatataagttgtctaagttaattttaataatcctgtgaggttatggttatttttgtcctattgcagatgatgaactgagggccagagagattagggagctggacagagttcaaccagccaggaagtgagctaggactggtggagcagagattctatcctggtttatctggccccaaagcagatcaccttgaccgttattgaatatttgacaggtgggacctagaggagggcaatatgttgaccaagggcacatagagcataggagacagagctgagacttgaatgcaggtctcttgactccaagccatgggtcttcatctcctatactaacagtttctgctcgcatcccagtctggtcctcgctggcaatgggttcctggggcagaggaccaggaggctggttgtgggggagtccatcctgatgtttgggactggggaggggcacaaaggaggcagggcccagctctagctctcttcccttctctggccaggacaagtggcagcacctggcctcagagggcagcagtcgtctggacatgtttgagcacatcagcctcatgaccttggacagtctacagaaatgcatcttcagctttgacagccattgtcaggagtgagttccttcctagggcctgggatatgaatccatggaccaaagggagaaagttggggagggaggaatgagcaaagtaaccagaagtacctttcgggaggatttgtatcatagctgtgctttgaaggtcgaggaagaggagaaagtgctgtctttccaggtagaaatatgtgtgtaaaagcaagaaggttaggatgagccaagcatgtgcaagagacagtagaaatgaggttgtggaagtaggggctagatattaagggcactgaaaatcaggaaaagtggtatgaagtttatcaagacatttccagagaccttttgtagtttcagctgatgatggatgtgataagagctgagctgtgtgggaaactgatagcccaccaccacgcccagctaatttctgtattttcagtagagagggggttcaccatgttgtccaggctggtctcaaattcctgacctcaggtgatgtgccctctttggcctcagaaaatgttgggattacaggcatgagccactgtgcccagctgcttcttctttcttacagggtgaaagagagagggagagagagagagacagagagacagagagagagagagagaaagagagagagagttggttatgctgggggctggagcagggctgaactggaagaggatgaagtctgagttgtgtggacagttttggtaaggaaaatgatcagtactgcatactggatgggagacagaggagagaagcatggtgtccaagctatactctaggtgcctaggtgcatggagacagctctctcagagataggatgcagggagagaagacagtctagagagtcagtctcatgactgatacccaccatgtatctctaggaccatctatttctagatactcagtttcctgatgggaggtagctcctggctgctggtgggaggtgttcctggggctttgcatacgttacattgttgcctccctttctgcccttgctctgcaggaggcccagtgaatatattgccaccatcttggagctcagtgcccttgtagagaaaagaagccagcatatcctccagcacatggactttctgtattacctctcccatgacgggcggcgcttccacagggcctgccgcctggtgcatgacttcacagacgctgtcatccgggagcggcgtcgcaccctccccactcagggtattgatgattttttcaaagacaaagccaagtccaagactttggatttcattgatgtgcttctgctgagcaaggtaggtttctctatgatctgaatttaggtgagagaatagagcttcatgtcaaatgtcaggtgaaataaattggttttgatccaaagggcactgggagccatggaagatgcttgagaaagggaaggtcacagataggttttagagatgactttattgcatgcagcccacagggcactgctaattctgaaactgtgaggagcatgatattttattcaacttataagttagtgtgttagtctttcacatttttatgtgtatctatatgtctatgtctttgtctatgtctgtatctatgataaaagatgcaccaaacccctggatcacagcagcccattaattatttacagcagtaacagcaggtggagtaggatggtagtgctggctccccattcctagggcaacacaatgtttttacctgtaaatgcacaagaatttgcaccaaggagaggggcccccacattatgagtattatagcttatataggacagctagctcatatgctccttctttattacagggtgaaagttagagacagagaaagagagagagagagaatgctttgttctggcgtataaactacccctctcctgtgagatggcaatttctagagttttataacccaaatatcttctggaaagataagattctctgggtttaccactctagaatgtcagcaaatatttttggagcaatacataatttctaacctccaaggcaaattgccattcaaatatcctgtaccccaggttgccagtatctttttctctgaaagtctgtattatgcagaaaaatgaaaatattcgagaaccattgattcctgtcaccagggtccaaagaggaggcaaaggatctgggggaagcccttggagttggggctttggtgatggtgaacaagagagatctagacgtgcagagtgcatttgagtttctggaagatcagagcttcagagattatctcaggttagactccggagtctcagagatagtataatttgtgtgtgtgtgtgtgtgtgtgtgtgtgtgtgtgtgtgtgtgtcttgctttctcttcaggatgaagatgggaaggcattgtcagatgaggatataagagcagaggctgacaccttcatgtttggaggtgagggtcccagtgtgggactacagtggagacagaggtccctccatctcaggatccgggtgggtggaccctggatcactccattctgcccatcttccccctccctccatcctcctgagggcctcaatatctgggcgctgtccaccctccggtgctgaagccaagcttacctggctgctcctcaggccatgacaccacggccagtggcctctcctgggtcctgtacaaccttgcgaggcacccagaataccaggagcgctgccgacaggaggtgcaagagcttctgaaggaccgcgatcctaaagagattgaatggtgagtgcaagttcttctggcctgttcctgagcccatcattggttctgctccccaagtgaggaggggtggaggagttgttttgtggattcttccactattgcttagtgggtataaaagcagaggaccacaggcagggcttgataccaagcctggctgtcaggggaaaagttgcaggcctttaggaccgaaagacccgggctgctaagagaattggtgacaatgtgtgaggacagataatgctactttgcacatgttcagcaaatgaacttcccctccactctgtttctgttctcccagaaatatcagttttttcgaaaatcctcacttcttgaatgtttgctcaggtggggagggagaagttgtttttgtcaattcttccattattgcttagtagtactaggagcagagcacagaggcagaacttggtatccaacctggctagcaggggaaagttttcagacttttgggacagagagtcctagcccgctgagagaactaaggacaatatatgaaggcagacgatgacatctagacatgttcagtcaatgaattttcccttcactcctttcttgtttactctgaattatcatatttttttcaaacatctttacttcctgaatgtttactcttctgttccctaattcctaccctccggtccagtccagggagtcctaagggagacctgggggtaaaagtcatctatcttttgtctagaacacctgcatcgttcatccattcagtcttcattcagcaaactcttccacatgcctttccattgccagttctgttcccacacctttctgtgctctggagacctggaaagaaccctgcctatggatgtgttttccaggtactcccagcctagtaggaacagtcccccacaagacattcccagtccacataggcaaggatggagttgagagcaagagaagcatggctgggagtacagaaagtgtgatagaaagtgtttcaagccagatctggtggctgtcgcttgtgataccaagtaccgaggaggctgaagtgggataatcacttgaggtcaggtttaagatcaacctgggcaatatagaaagaacccatttctaaaaaagtaaaaaaccaaaataataaagtgcctcaactgaaaccctgaatggtgatcagtaggtgtttggatgcagtagtgccctaggtcaaaaagaaagtctgggcaaaaatgcaaaaagagggagcaggagagagggagaagagggaaagagaggtttgtgtgtcagggaaggagatggttataaagggagggagaagtaagagggaggaaaagtgagggagagcaagataaagagaggagggaagacagaaggagacagagagagaatgagagagaaaggaactgagttgtgatgagataataactatggtagtgaaagcagagtctggctgtggaaaatatgggaaaatggtaatggcttccattttaacccaaaggcaatgggaagccataacaagtggttgagcaggggaggggcaggtcatatctgggcaccagaaagatcttttcagagctactgtggagagaggaccagctgtagaatgaagtcccagtgaagacattctgggacctgagccagggcaggggctggggatggagaggaggcaatggactggacatgtgttttggaggccgtgtcctcccgtccaagcctttgctcagcacagcagtcctaaaaggtggcaacactttttatgcttttaaaaaccaagatatcaagtaatactgtgcactttgtaaacaaaaaaaagtgtctaaaacatttataaaaatgagctttcctcatgcctgtaatcccagcactttggaaggccgaggcgggcggatcacgaggtcaggagatcgagaccatcctggctaacacggtgaaaccccgtctctactaaaagtataaaaaattagccgggcgtgatggcaggtgcctgtagtcccagctactctggaggctgaggcaggagaatggcgtgaacccgggtggcggagcttgcagtgagctgagatggcaccattgcactccagcctgggcaacagagtgagactctttctcaaaaaaaaaaaaaaaagagcttccttcttaactgtcaccctagtagtttctaccatcaatggttttgtgtgtccctccagaagatggctatcttgatgcccactttataagaacacagacttcttctatacaaataagagtgtataaaatagacacagtactttttcccaagatggtgggttggaggcaatgtcagtgtgcctctcccatgtggaaggacagaatagtgtgtagagattcacagtgtaagctttcttttcccaagaaacaacacagggacttaacaggaaaaccagaagaatccacaaacccttcaaaagaagctacaggctgcattctactctgtgagacaggtgaaaaactgtgaatcctcagagtaagagggggagagactgcttcctaggtacacatcttcactggggaatctgaaaatccagaccacaggagaaggccttaactctatccagggcttgaactgatttagggagtggtaagaaatataaaagtagaagcagcagcaggaagtcccttgcaggcattcacaatctccagcatggactgagggaagccattccttattgtatctcacaggggaccttggggaagtcagacaactagctcaggtgaggtcacaggttgaacgaaatgcccaaatgaatttcttgatataacctcgagtggggatgaactcccttgaccagaacccgggaggcaagcaggaagtgtgctgcagacaggagttcagaagctgggtgcctggccttggacagggacaaaaaaggacatggcctgaaagcattgctatttctgtgggaaaagcttatggcctggggcagggctgagttctgtgcacagactgcctggatctaaatccagtgctatgagtggaacactgcatgtgtgagacccaccttgtgccaactgcatgggagctagatgaggcttactgccacctgctactctccactcccttgtcaaactcttctgtgaggcagaggcagttatactcacctctggatcattaccccagtgacctaagaaccaccctctgactctcacagggcaaaacaaacaaacaaaaaaacagttgcaaaaaaaaaaaaatacctaggaatatacttaaccaaggaggttaaagctctctacaaggagaactacaaaacagtgctggacaaaaccatagatgacacaaaccaatgaaaacacatcccatgttcatggattggaagaatcaatattgtgaaaatgatcatagtgcaaagcaatctacagatttaacgcaatgcctatgaaaataccttcatcatttttcacacaactgggaaaagcaattctaaaattcatatggaaccaaaacagagcctgtgtagtcaaagcaataccaagcaaaaagaaaaaatttggaggcatcacattaccggacttcaaattacattacaaggctacaattaccaaaacagcatggtactggtataaaagtaggcatttagatgaatggaacagaaaggaggacccagaaataaagccaaatacttacagccaactgatctttgacaaagcatacaaaaacataaattggggaaagacaccctattcaataaatggtgctgggaaaactggacagtcacatgtagaaaaatgaaactgcatccccatctctcaccttgtacaaaaatcaaaggcttaaatctaagacagaaaccataacaattttataagataaccttggaaaaactcttttggacattggcctaggcaaagaattcgtgaccaagaccacaaaagcaaatgcaacaaaaccaaaaataaatcagtggaacttaattaaactaaaaagcttctgcacaacaaaataataataataataatagccgacttaacagacaacctacagagtgggggaaaatatttgcaaactatgcatctgacaaagggctagtatccagaatctacaaggaactcaaacaactcagcaaggaaaaaaaacaaacaaacaattagttccatcaaaaagtgggcaaagggcatgaacagataattctcaaaagaagatacacaaacagccacgaaacatatgaaaaaatgctcaacatcactaatcatcagggatatgcaaattaaaaccacaatgagataccatcttgtttctacaagaatggccataattaaaaagtcaaaaaacaatagatgtatgttgtggatgtattgaaaagtgaatgctcatacactgctatgaaaattaacataacctctgtggaaaacgataaggatattccttagcgaactaaaagtaaatctaccattccatccagcaatctcactactaggtatccacccaaaggaaaagtgattatatgaaaaagacacatgcacatgcatgcttatagtagcacaattcacaattgtaaaggtacggaaccaacctaactgcccattgaccaatgagtggataaagaaaatgtggcatatatacacaatggaatactactcagtcataaaaaggaatgaaataatgtcttttgccgcaacttggatggagctggaggccattattctaagtgaagtaactcaagaatagaaaaccaaataccatatattttcacctataagtgggagctaagctgtgaggacacaaatacatacagagtgatataatgagctttggagactcggagagcaaggttgggagccgggtaagggagaaaagactgcatattggggacagtatacactgcatgggtgatgggtgcactaaaacctcagaattcaccactatagaaatcatccatgtaaccaaaccacttatatcccaaatgctattgaaataaaaggaagtaaagaagagacagatctgcacattaacaatatatctttgggagcttttctttttctaaaaatatgagttttggaaaattagttcgtttttatttttaattggcaaattttaattatatatgtttatggggtgcaatgtgatattatgatatatgtatacaacgtggaatgattaagtcaatttaataaacatacccgtcatctcatatactcatcatttttgtggtgagaatatttgaaatttgctctcttagcaattttgagaaatttattattattaactgtagtcaccatgcatgcaatagatctcaaaacttattccttctaacggaaacttgtaccctttgaccaatgtctttccattctttcttcctcccttctctggtaaccaccattctcttcttggtttctatgatttctgtgttaattatttcagatctcacagttaattaaggttatgtgctgtttgtctctttgtgcctggctcatttcacttagcataatgtcctttaggttcttgcagattgccacaaatgaaagaattttcttctgttttaaggctgactagcattccattttgtatatatacaccacacggaaaatgagttttgaattacaaaagcaatgatgagaacagtttcttcttgcactcaatgaggcatcacagatagacaagggttattcttgacattcctgctatcccacctaatatcctccctttctccaagggggcctgtagagatacttatttgtcatctatctgtctgtctgtttacatctatctacatatctttctatcatcgatctcttcttatattccttatattttttgtcctatggtatttacatatatggacatttgggaacatgtttttttccactcaatactgtgtctgacagatattttttctgagtgctgaatagcattccatgttttatttggcccatccctttgttgaagacacttgcgtaaacatttccaatcattggaggtatggccaatttgcattccagagtctctgtactgatttagcttctggtctgcattgtgtgacaggactagtgatcctttttttctccttttgtgtagctgtatactattccattgtgtggatgtttatctaaacatctccccatccatgtatatttggcttgtttcatccttttgctaaattaaacttgtgcaatcggcatgtgtgtacagtgagcattgctcatatgtataaacatcactgcaggacaaattcccaaaagtgcaattgttgaaccaaagaccatttgcattctacagttgtaataatgattgcaaatccatctctatattaggtgagtttgatggcactagctttcccacaaatttgccaatagtattattgtattattaaatttaaattttttgtccatcttcatatttcatcttttaatgagcattttcttaaataagagtgagaaagaacatcctttgcccaagttgataagccatttattttctttctatgggagtggtcatctgatattttctgctgtttttctttgggttcttttttcttatttacttataagaatgtgtatcacaattaatgttttttttttctgtttttttgttgcaaaagattgccttttgacttttttggggggtgcttttggttaatttttatgaagttacatttgttcgtattttcttttgtaccacactacccagctatttcccagagttttgtggggcttcctttggcagatgggaagtttccacttattcacatgcccgtctctgacctttttagtcttttgaatgcatccgtttttatggcattgccagactattttttcttactgtgacttttcttttcttttttctttttttgagatggagtctagctttgtcgcccaggctggagtgcagtggtgcgatctcagcttactgaaacctcctgcctctctggttcaagctattctcctgcctcagcctcccgagtaactgggactacaggcaccctccaccacgcctggctaattcttgttttaggtagagatgaggtttcaccacattggtcaggctggtctcaaactcttgacctcaagtgatccacccacctcggcctcccaatactctgactttctaatgggttttaatatctggcagagtggctttttttgttgttaaatcaacccctgcaaacatttattgtgtgataaagtgtatgttttatttggattgagggaaatttataatgaaatacagagatttcatgtttctttttaagtttaatccaggtattttatattattatgactagtatcttttcttttattatcttttcatttgatggttatttctatatggtaaaactaatgatttatgcatataaattctatgcccagtgaacatagtatatgctaaagatggtatctgtatcaagagaaaaaatatagataattaagtaaaagctcttggggcaactggaaagccttctggaaaaaaggcaactgaaccttgttctcatatcttatgacaagataatgttcagattaatcatttttttctaaaagagtcctaaaagctctagaaggaaccatgagaaaattatttcatagcgccagagtagggataaccttattttgacgtaagtcccaggggctatgaaaaagtgataaactgttaaatgagagaaaagatacacgccagccacggtggttcatgactgtaatcccagtactttgtgaggccaaggtgggcagatcacttgagatcaggagttcaagaccagccttgccaaattggggaaactccatctctactaaaaataaaaaaaaaaattagctggctgttgtggtgaatgcctgtagtcccagctacttgggaggctgaggcagtagaatcacttgaaccagggaggtggaggttgcagtgagacaagattgtgtcactgcactccagcctgagcaacagagactccattccctccccccatcaaaaaagatacagaatagtgtctacagtagatggtgtgctcctatataattttttaagatgcttaaaatcagcccagaaagcatacattaaaaaaaataataacctggcaacgtgtggggagaagtaaatggcattgggccataggagtgaattatgttttatagttttcaaattctgaaccagataattgtagacggtatgaaaattttaaatagccactgcaaaagaagaaagattaagcagagaattcagctcctttgcttgatcttaaatgtttataaacgttttccagtggggcctctagtgttttctaagtataaaatcactatctgccaaaatgatacatttactaccacatttcaaattgcctgactctcgtgtttttttggctgcataaatgtcttcttttgagaagtgtctgttcatgtccttcgcccactttttgatggagttgtttttttcttgtaaatttgtttgacttcattgtagattctggatattagccctctgtcagatgagtaggttgcgaaaattttctcccattttgtacgttgcctgttcactctgatggtagtttcttttgctgtgcagaagctctttagtttaattagatcccatttgtcaattttggcttttgttgccattgcttttggtgttttagacatgaagtccttgcccatgtctatgtcttgaatggtaatgcctcggttttcttctagggtttttatggttttaggtctaacgtttaagtctttattccatcttgaattaatttttgtataaggtgtaaggaagggatctagtttcagctttctacatatggctagccagttttcccagcaccatttattaaacagggaatcctttccccattgcttgtttttctcaggtttgtcaaagatcagatagttgtagacatgtggcattaactctgagggctctgttctgttccattgatctagatctctgttttggtaccagtaccatgctgttttggttactgtagccttgtagtatagtttgaagtcaagtagcatgatgcctccagctttgttcttttggcttaggattgacttggcgatgcgggctcctttttggtgccatatgaactttaaagtagttttttccaattctgtgaagaaagtcattggtagcttgatggggatggcattgaatctataaattatcttgggcagtatggccattttcatgatattgattcttcctacccatgagcatggaatgttcttccctttctttgcaccctcttttatttcattgagcagtggtttgtagttctccttgaagaggtccttcacgtcccttgtaagttggattcctaggtattttcttctctttgaagcagttgtgaatgggagttcactcatgatttggctctctgtttgtctgttattggtgtataagaatgcttgtgatttttgtccattgattttgtatcctgagactttgctgaagttgcttatcagcttaaggagattttgggctgagacaatggggttttctagatatacaatcatgtcatctgcaaacagggacaatttgacgtcttcttttcctaattgaataacctttatttccttctcctgcctaattgccctggccagaacttccaacactttatgcagccaaaaaacacatgaaaaaatgctcaccatcactggccatcaaagaaatgcaaatcaaaaccacaatgagataccatctcacaccagttagaatggcaatcattaaaaagtcaggaaacaacaggtgctggacaggatgtggagaaataggaacacttttacactgttggtgggactgtaaactagttcaaccatggtggaagtcagtgtggcgattcctcagggatctagaactagaaataccatttgacccagccatcccattactgggtatatacccaaaggactataaatcatgcggctataaagacacatgcacatgtatgtttattgcggcactattcacaacagcaaagacttggaaccaacccaaatgtccaacaatgatagactggattaagaaaatgtggcacatatacaccatggaatactatgcagccataaaaaatgatgagttcatgtcccttgtagggacatggatgaaattggaaatcatcattctcagtaaactatcgcaaagacaaaaaaaccaaacaccgcatgttctcactcataggtgggaattgaacaatgagaacacatggacacaggaaggggaacatcacactctggggactgttgtggggtggggggagggggaagggatagcattaggagatataactaatgctaaatgatgagttaatgggtgcagcacaccagcatggcacatgtatacatatgtaactaacctgcacattgtgcacatgtaccctaaaagtataataataataaaaaaaaaaaaacaaattgcatgactctccttttttcccttgcctaattgcacttgctggtatctctagcatcacgctaaataagagcaaaacattggatctgggtattttgtttgttattcatttgcatttgagtttgctttcttgccatagacaatatttatttttatgtgagtttgttaattttttaccgctggcttctgggtgttttcctcagagtatttatttttatctatttggctaaattttctctggtacttttctaattctctgcttctctaattgttttctgctttttaaaattctcaaatgtttgatccccgtggagtttattttgtgatagggagaaaaggtctcatttgcaaatagaaaaggtggagagttgtgtatttgttcccttgataatgactggggctggggtgtttccttagggacgacctggcccagctgcccttcctgaccatgtgcgtgaaggagagcctgaggttacatcccccagctcccttcatctcccgatgctgcacccaggacattgttctcccagatggccgagtcatccccaaaggtgcccacagcctcagggggagaagcctcccgggtaggaagatggttccctcaggggatccttgtcctgactgcccctttctctcccacaggcattacctgcctcatcgatattataggggtccatcacaacccaactgtgtggccggatcctgaggtgctgccttccccattcaccaccaccacccccatcctctacttttgtgtgtgtgtgtgtgaattccaaggttcctagtggagggggcagggttttgatgaggaaaatccaacatcacctcaccccaaaacacacacaagtgtctctccaaggctgctggacataggaaatcccactggcaaaccttctttgtctcacctgcaggtctacgaccccttccgctttgacccagagaacagcaaggggaggtcacctctggcttttattcctttctccgcagggcccaggtaagagcgccctgtgtctgaggcagggatgggatgatgggtgcgggagttaaaaaaagggggacgttgcagatggtcccagttccagctctccttccctccattccttcacagtttatgggaaaacgtccatagaatggggatgagtaggtcctagaggggtccgcggagtgctcaaaatccccttctccatctgctggtctgagctgggagctggagtcaggcccagtctccgggacatacaagcccacatgggagtcccaggcacgcttagtctttctctctctctctcaggctgagctgggtgcagttgggggtcccaggccaggttcctgggttgatgggacccaaatgcgggtcttgggcacagtcacagtccccactcccgcctgcaggaactgcatcgggcaggcgttcgccatggcggagatgaaagtggtcctggcgttgatgctgctgcacttccggttcctgccagaccacactgagccccgcaggaagctggaattgatcatgcgcgccgagggcgggctttggctgcgggtggagcccctgaatgtaagcttgcagtgactttctgacccatccacctgtttttttgcagattgtcatgaataaaacggtgctgtcacctctgcctgggcctcactgacagcctgcagggggctcttggggactgggaggcttcagggaaggggcctaacctgggtgggttaggcgggatgttttccctgaaaccaagaacctgactgcctctttggctgagcatagggcctccatgcttatagcagggtctctcagagcccaagtatggactttatcctgtggacaatgtggagccatgggaggtttttgagcaggagagggaccaggattaagaacggatttaagaggtacgactgaggctaagtgagaagcaaccataggggcagatcctttcttttggtctgggagtgtcccaagaccgaggtccctggccagttcagaacacaaggatagaagggtgcagcttataccctggcaggctctcaggagttctgtttcctttcttgctaatgtcccaccctatgtctcccccttccagttgatcgcttttgtgacccctttccctaacttcaggcagctcctatttttcctcttttgagccctctgactctgcccaggctgcttgtccatcagctgctatctgaatcctccccctactctcttctgctatgtgccaggcactctcacaagtgtcaggggttgggcacgtcttcaccctttcacctctagattcctccttcattcccatcactgacccatcttggggtggggtgcagtcaggaacatcctgtttgacccttgagattcaaagacagatgactggaaacagaacaccatcccaaaggtatgggatctggagccagactgttgggctgaagtctcatctttgctgtgtgacttgagtaagttaattcccctctatgcacttcagtttcctcaaacatataatgtgggcaacaacactacctaactcagggttgtcctgaggacaaaatgtggagaactcagaacttgttgcctggtgcatattggatgcttaataaatgtggccattattacctcctctctgagaaagtctggctaataaaccatgttgcctttcaagatagtttttttctaccacgactttaaagactgtcttggaacttacaggcaaaaattgtaatatttgtgctccttgaataatctcttgccttttagagggctgtgcatttaggaggcaattttttctaagactggttgcgggcacctgaaagtgcaaggtggtaggagaaggaaagaagcctcagttaatgttttaaaatgatgtcctgccacaaacattgacctctgttcatagcctaaggaattctgcaccgctgcaccctgcagacttgtcaaatcttctctccagctcatattcctcccttgttacactcagtcaccttgtccttgattcttatctccaaatacattatattttcttgtttagggccattgtacttccttggaactcttgtgaaagatcagttgcctatacttaacgtgggtctattttctgggatttgtattctggtccattgacctatttgtcttttactaataccacaacatcttgattactgtaactttacagtaagtcttgaagtgggatattgtcattcctcaaacaatattccacttcttcaacagtgtgttgactattctaggtcttttgtctctccatgtgcattttagagttagtttgttgatatccattaaaaaagccttcttaaatttttactgggactgcattgaatctacataattacttgggaagaactgacatcctgagaatattttctgccttataagaaatgctcaaggaagtcctgcatctggaagtgaaaataggataactaccatcatgacaacatacaaaagtataaaattatctggcagaaactggaaaaaacttcacagtgtgaacctttacacactattttgtcttccaagtggaagaagcatactaacaatgccaccaatccaccatctcaggaaaaaaattaataaactgtcttttctgtaatccccttttcaatgggggtgaggtgttatctcactgtggttttgatttacgttttttgagaaccaaaagcaaacaggagtagctatatttatatcaggtaaaatagactttaagttaaaatctgtaaaaagagacaaagatgtttattatataataataaagggatcaattcaactagaggaaataattgcaaatgttgtaaatatttacaatattatttacacccaatagtagagtacccagatatcgaaagcacacattattagatctaaagagagacatatactgtgatacaataatcactggggacttcagcaacccactgtcagcattggacagttcatctagactagcagtctccatcttttttggcaccagggacgagtttcacggaagacgattttcccatggacgaaggtaggggatggttttgggatgattcaagcacattacacttatcattagatcctcataaggagtgtgtaaactagacgcctcatgtttggagttcacagtagggttcacattcctatgagaattgaatgctgctgctgatctgcatccgatcagcagggcaagaggcggagctcacctttgcttgcttgcccaccactcacctcctgctgtgcagcctggttcctaacatgcatcggattggtattctatacatacatatattaattaatatatattataatatgtctttcctttttttggtgatcttttcagtgtctttcatcagtgttttatagttttccttgcagagatcttttgcctacttatttaaattaatttctatgcaatatatattactaagaaatagtataatacatatgtgtatatatattatatatatataacttagaaataaatttaacttactcagttaaatttatttctaagtggctgggcgctgtgtctcatgcctgtaatcccagcactttgggaggctgagccagttggatgacctgaggtcaggagttcaagaccagcctgaccaacatggtgaaaccctgtctctactaaaaatacaaaaattagctgggcgtggtggtgtgtgcctgtaatctaaactgcttaggaggctgaggcaggagaatcgcttgaacccgggaggcgaagatttcagtgagccgagatcgcaccattgtacttcagcctgggctagaaaagtgaaattccatctcaaaaaaaaatatttctaagtaatacagattactaagaaatagtatagtgtatatacatgacttaaaaataaaaataactaagcagatgaaagagctctgcaaggaaaactataaaatactgacaaaagaaactgaagaggtcacaaaaaaaaatagaaagacattccatgttggaaggaacattattccaacattagttggaggaactaatattgtgaaaatgactcagctaccaagaacattctacagatttaatgcaatctctgccaaaataccagtgacattctctagagaaatagaaaaaaacagattctaaaatttatatgatatcatagaacactacacagagttgaagcaatcctgagtgaaaagaagaaatctggaagaatcacactatctgacttcaaattatactacaaagctatagtaatcagaacagtatgatactggcataaagagagaccaatggaaaaagaccaatggaacagaacatagaacccagaaataaatccatgaatttacacccagctgaatttcaacaaagttgccaagaatattcaatggggaaaggacaatctcttcaataaatgatggtgaaagaactgaatgtgtacatgcagaaaatgaaaccagatgcttatctcttaccatattcaaaaatcaaaccaaaatggataaaagacttaaatgcaagacctgaaactatgaattactcgaagaaaacattggggaaatgcttaaggaaactgatacgggcaagaagttttttgataagaactcaacagcataggcaacaaaggtaaaatggtgaaatgggattaaatccaacaaaaaagcttcttcagagcaaagaaatcaatcaacaaagtgaagagacaacctacagaatgagaagaaaaatttgcacgttttcagtctgacaaaggattggtaatcagaccatatgaggaactcagacaactaatagcaaaggaaacccaaaaataattcgagtaaaaatgggcaaatgatctgaatagacattcctcaaaagaagacataccaataggtatatgaagagttgctcaacattactaaccatctgggaaatgggaatcaaaaccacagtgagataacatctcacccccattgaaatggggattatagaaaagacagtttatttatttttttcctgagatggtggattggagggattgttagcatgcttctcccacttggaagacaacatagtgtgtaaagattcacactgtgaagttttttccaagaagtgacacaggaacttaacaggaaaactgaaagaaaccaccctttgaaagaagcatcaggctgcagcctacaccacgagccaggtggacaactgtaagtccccagagtgtgagagagggtaaagtgcctccaggatatacagtcccaccggggaacctggtaatccaggccacagggaaggtcttaatccttccttgtggcaggccaactgggtggctgggtcttaatccttctgagtactggagctgacttagtaagtggtgggagtatatgagaagtggcatcagggcaggcattcccagtctctggcattcccagtctccagcaggacaaagggaagccattcctgatcctacctcacaggggacctcatggacgtctgccagctaacacaggtggtggtcacaggttgagagaaactcccaactgagattcacaatataatctcaagtagggataactcccccgtggtcagaccaagaggcaagtgggaagtgagctgcagcaaccagcacaggagcttggtgttcctgcttaatgggcaaacctggagaggtgtggcctgaaagctgcagatactggctcagcattggacttttgtgtccctgcttaatgggcaaacctggagaggtgtggcctgaaagctgcagatactggctcctcagggaaggcgtatggcctggggcacatttgaattctgagcacagactgcctggaacctagctagctgctgctagtggaacactgtgggtgcaagacctgtcttgccaagagtgtaggagctgggtgtggcttattgccacctgctactccccattccccatacagactcttctgtgaagcagaggcagctgtgctcctccctggacattattcctgcaaccagagaaccactctctgatccccagtggggctactgcttttgtccagaggtggagagccagagtgcggacttgcctgattgagctctcacttggctttgcccctccacctgccctgatatattaatacgtagggcagaaatttttgggagccctatggcccccccgcccggcccgccactgcctgagacgcgagagtacctcctctgggtaacataagacagacacaaattccactgctaccaccacagctggtgttattttgcaagcgccacctcctggctgtgggccaattgacagagtccattatagtatctgcttgcaagcacaataacagccagcaggaaggagaaaacttgtgcatgacctcagctatcactattgcctgcatccatctggttaatcaggaagttctgagtctgtccacatgaccagtttgttagtaccacagctggcatttgagaaagccaacacactaaggctacttataactgagcaatctcacagaatctacatcactccccttcttcccccatcagagctggggctggtaccactgctgggggttttgaggatccgttacttgattggccccttgcagatattctccagcaccagcataaattgtggcagccccactgggtggctagaccaagaggagccgcagccttcatagtagtctggctctctgagactcctacttctagggggaaggggagtgcaccgtatcaatggagcacaccatgggacaaaagattccagatggtagaccttgagtcccactttccgcatatgagaagttgcttttctttttctttttttttttttttgagacagactttcgctctgtcccccaggctggagtgcagtggcgcaatctcggctcactgcacctgggttcaggcaattctcctgcctcagcttgctgagtagctggggttacaggcgcctgccaccgtgcccagctaacttcttgtatttttagtagagatgaggatttgccatcttggccggctagttttcaactcgtgatccactcgcctcagcctcccaaagtgttgggattacaggcttgagccgctgtgcctggcaagaagtttctttcagcagaggcataggtgcagtgctgggttcagtggcggaaatgtctgcagatctacttcaacagtcaggcacttctggggatcaatgaagggtcttagagaaggggactttttcttccccttgtccactactgcagacacagctgcagcttctcccatgacagcttggcatggctacacatgtagacattcattctctctggaatagttcagagtgactgcattctataggaggagcactctccaggttcaggcttgcatgagtggcagagccccagtccctctctacagggaatatcagcattcctgcaaatgaaaagaggtgcctatctgatctgactagtcagatcactgggtcaggagtgtatctgggaggtgggtaggtttcctgctgtcctggcaggggagctgaggaggctccctcccttccccttgaaaagacctccatgtgtttccctgagagctcccccaaccacatctgtcaaggatggcacctttgccccccactgggaactgcattgaccaaactgctttaaccacagctggtttttattcatggatacctcccttgagtggcctaaagcctgaactgttcatccaggtaaaaaaaaaaaaggttggggggatataaataaataaataaatgcatactactggggaatgagataagcttcaagagacctctgcccttccaacaccaacagaaacagtgaacctgccctcacactgagcacattgctactacaactagcatctgagaaagccaccatacaaagactccgtataaccaaggaactcatacagagtctgcacccacgaaagcacccagagccataggttacaataaactctaaacatcaaagtcacatcctcaaagggaaaaaagatctaagaaacatcacaattaatcaaaaataagttcaaaaataattagaagaagcagtctaaccaggtgagtggaaatcagaaaaataattctggcaatatgacaaaacagggttctataacaaccattagctctccagcaatagatccaaaccaagaagaaatctttgaaataccagataaagaattcaaaagattaattattaagttactcaaggagatacaagggagaactgaaaaccagcataaataaatttaaaaattaattcaggatataaataaaacttttctaaagaaatagctattttaaagaaaaatcaatcagaaattctagaaatgaaagacacatttagagacttacaaaatgcaggggaaagttttgaaagtaggcttgaccaagtcgaagaaagaatttcagagctcaaagacaaggctttgagttaaaccaattagacaaaaataaagaaaaaagaactaacttttttctttcttttttttaaaaaaagaaaagaaatggaaagtgtacccaagaaatacaagattatctataatggccaaatataagtatcactgatgttcctgaggaagaagataaacagaaagtttggaaaacttagtttagggaataactgaggaaaactttcctggtcttgttagagatttagatatctaaatataataggctcaaagaactcctggggaattatttgcaaaaaggacatgaccaaggcacatagtcattaggatatctaaagacaacatcataggaagaatgctaagagcagtgaggaaaagcatcaggtacctataaaggaaaacctatcagactaacaagacttctcagcagagactttatgagccagaaggaattagggtcctatcattagctaccttgtacagaaaaaactgtcagccaggaattttgtatccaacaaaactaagtaaaaacagaaggagaaataacatctttttcagacaagaaatgctaagggaatttgtcctaatagaccagtcctacaccagctaaaacctgttttgctaaactacatttatgcacaacgagcacagagataaactaaaccaaaaaaaagtatgaatgaaaccactgggatccttctatccccaccaccaatgattgctaattactaattgctaagaggatttctttttttttttctattaccaaaatatccatttgggtttattcaaattttttttttatttttttatttattttattttattattattatagttttagggtacatgtgcacaatgtgcaggttagttacatatgtatacatgtgccatgctggtctgctgcacccattaattcgtcatttagcattaggtatatctcctaaagctatccctccccactccccccaccccacaacagtccccagagtgtgatgttccccttcctgtgtccatgtgttctcattgttcaattcccacctatgagtgagaatatgcggtgtttggttttttgttcttgcgatagtttactgagaatgatgatttccaatttcatccaagtccctacaaaggacatgaactcatcattttttatggctgcatagtattccgtggtgtatatgtgccacattttcttaatccagtctatcattgttggacatttgggttggttccaagtctttgctgttgtggatagtgccgcaataaacatatgtgtgcatgtgtctttatagccgcatgatttacagtcctttgggtatatacccagtaatgggatggctgggtcaaatggtatttctagttctagatccctgaggaatagccacactgacttccaccatggttgaactagtttacagtcccaccaacagtgtaaaagtgtcctatttctccacatcctctccagcacctgttgtttcctgactttttaatgattgccattctaactggtgtgagatggtatctcattgtggttttgatttgcatttctctgatggccagtgatgatgagcattttttcatgtgttttttggcgcataaatgtcttcttttgagaagtgtctgtttatatcctttgcccactttttgatggggttgtttgtttttttcttgtaaatttgtttgagttcattgtagattctggatattagccctctgtcagatgagtaggttgcgaaaattttctcccattttgtaggttgcctgttcactctgatggtagtttcctttgctgtgcagaagctctttagtttaattagatcccatttgtcaattttggcttttgttgccattgcttttggtgttttagacatgaagtccttgcccatgcctatgtcctgaatgataatgcctaagtttacttctagggcttttatggttttaggtctaacgtttaggtctttagtccatcttgaattaatttttgtataaggtgtaaggaagggatccagtttcagctctctacatatggctagccagttttcccagcaccatttattaaatagggaatcctttccccattgcttgtttttctcaggtttgtcaaagatcagatagttgtagataaatggcattatttctgagggctctgttctgttctattgatctagatctctcttttggtagcagtaccatgctgttttggttactgtagccttgtagtatagtttgaagtcaagtagcgtgatgcctccagctttgttcttttggcttaggattgacttggcgatgcgggctcttttttggtgccatatgaactttaaagtagttttttccaattctgtgaaggaagtcattggtagcttgatggggatggcactgaatctataaattaccttgggcagtgtggccattttcacgatattgattcttcctacctatgagcatggaatgttcttccatttctttgtatcttcttttatttcattgagcagtggtttgtagttctccttgaagaggtccttctatctgatctttgacaacatgacaaaaacaagaaatggggaaaggattccctatttaataaatggtgctgggaaaactggctagccatatgtagaaagctgaaactggatcccttccttacaccttacacaaaaattaattcaagatggactaaagacttaaatgttagacctaaaaccataaaaaccctagaagaaaacctaggcaataccattcaggacataggcatgggcaaggacttcatgtccaaaacaccaaaagcaatggcaacaaaagacaaaattgacaaatgggatctaattaaactaaagagcttctgcacagcaaaagaaactaccatcagagtgaacaggcaacctacaacatgggagaaaactttcgcaacctactcatctgacaaagggctaatatccagaatctacaatgaactcaaccaaatttacaagaaaaaaacaaacaaccccatcaaaaagtgggcgaaggacatgaacagacacttctcaaaagaagacatttatggagccaaaaaacacatgaaaaaatgctcaccatcactggccatcagagaaatgcaaatcaaaaccacaatgagataccatctcacaccagttagaatggcaatcattaaaaagtcaggaaacaacaggtgctggacaggatgtggagaaataggaacacttttacattgttggtgggactgtaaactagttcaaccattgtggaagtcagtgtggcgattcctcagggatctagaactagaaataccatttgacccagccatcccattactgggtatatacccaaatgactataaatcatgctgctataaagacacatgcacacgtatgtttattgcggcattattcacaatagcaaagacttggaaccaacccaaatatccaacaatgatagactggattaagaaaatgtggcacatatacaccatggaatactatgcagccataaaaaatgatgagttcatgtcctttgtagggacatggatgaaattggaaatcatcattctcagtaaactatcacaagaacaaaaaaccaaacaccgcatattctcactcataggtgggaattgaataatgagatcacatggacacaggaaagggaatatcacactctggggactgtggtggggtggggggaggggggagggatagcattgggagatatacctaatgctagatgacgagttagtgggtgcagcgcactagcataaacaataagagaagaagagaggaataaaagatatacaaaacaactagcaaacaatgaataaaatgacagaagaaggttcttacctataataactttgaatgtaaacagattaaatcccccacttcaaatatatagactggctgaatggattttttaaatgacccaactatgtacttcctacaagaaattcactttacctatccagaaacatacagactgaaagtgaagggatggaaaaagacattttacccaagtggaaaccaaaagcaaataggagtggctatgtttatatcagataaaaataaaacagacaagggataaattcagcaagagcatataacaatagtaactctatatgctcccaacactggaacacctaaatatagaaaataaatatttttaaatctaaaaggagagatagactccaatacaataataattgtggacttcaataagccactctcaacattggacaggtcatctagacagaaagtcaacaaagatacattgtatttaaatttaatttcactttagaccaaatagacttaatagacattgacagaatggtttgtgcaacagctgcagaatacactttttttccattagcacatgtagcccacacattgggctacaaaggaagtctcaagaaatttaaatgtactgatatcagagatcgagaccatcctggctaacacacagtgaaaccccgtctctactaaaaatacaaaaaaattagccaggtgtggtggcaggtgtctgtagtcccagccacttgggaggctgaggcaggagaatggcctgaactgaggagtcagagcttgcagtgagccaagattgagccactgtactccagcctgggtgacagagagagactccgtcccaaaaaaaaaaaagtactgatatcacgttaagtatactttctgctggcaaggaaataaacctagaaatctgtaacaaaaataactttcaaaattgtacaaatacatgaaagttaacaacatgctcccaaacaactaatgaataaataaaatattaggaagtacatttaaaatttgttggattaaattaaagtataagcacaatatatcaaaagctatgagatacagcaaaagcagtattaagaaggaagtgtatagtaataaacacctacatcaaaaaagtagaaagatttcaaataaacaatctaataatgcacctcaaagaactagaagagcaaaagcaaaccaaactcaaaattagtagaaaaaaatgaagtaataaagattagaacaaaaataaatgaaattgaaagtaaaaaataaaatacaaaagatcaataaaacaaagagttgggtttagctagaccaagtgagaacaaaacatttagctagaccaagtgagaacaaaaagactcaaataaatgaaatcaggaatgaaaaaggaggagacacaacagaaaatctaaacaggctaattacaagtaatgaaatataatcagtaataaaaactctctcatcaaagaaaagcccaggacctgatggctttaaagatgaattctaccaaacattaaaaaaaaaaagactcaataccaattcttctcaaactattccaaacatcaaagaagaaggaattcttcttaactcattctatgaagccggcattacccttataccaaaaccagaatgggatgcaagaagaaaagaaaaccacagaccagcatctctggtcaatagaggtgccaaaattctcagttacatactagcaaactaaatccatcagcacgctacaaagataatttactatgatcaattgagctttatcccagggatgaaggatgttttgatacattcaaataaaaaatgacataacatcatatttattgaagagcaacagagtgaatagcaaaaatcatatgatcatctcaataaatgtaggtaaagcatttgataacattcaaaatttcttcatgataaaaagcactcaacaaagtaagtatagaaaaagcatacataacaaaataaaggataggcatgacaaatccacagccactatcacacaaaatgggcactgaaagttttcctctaagaacgggaacaagagaagtatgtccagttccaccacttttattgaacatagtgctggaagtcttagccacagagatcaggcaagagaaagaaaagagtgggcaaggatgtcaaattttccctgtttgaagatgacataatatgtgcatagaaaaccctaagtgctccaccaaaagtctcttagaactagtaaaccaattcaggaaagcagcaggattccaaatcaacctacaaaatcactagtgtttccatacacaaatgatgagctagcagaaaaagaaagaaaccaatgccatttacattaggtagatatgtatatgtgtttatatatatgtgtgtgtgtgtgtgtgtgtgtgtgtgtatatataaaatttcttaataaatttaaccaagtagttgaaagatctctgcaagaaatactataaaacactgatgaacgaaatggaaaaggtcaccaaaaaatggaacatcatctcctgttcatgaattggaagaaataatattgtgaaaatgactctactactaaaagcaatatatagagagaatgcaattcctatgaaaataccaatgagatttttcacaaaatttcaaaaaattctaaaatttatgtggaatcacagaagactccaaatagcaaaatccgtcctgaggaaaaagaacttagacggagatattacactaccaacttcaaattatactacaatgctgtagtaaccaaaaacttatagtactggtataaaaagagatgcatagatcaatggaacagaacagagaatccagaaatacattcatgaatttagagccaactaatttttgacaaaggtgcaaagaccattcagttagaaaaaaacagtttcttcaataagtcgtgctgaaaaaactggatcttcatatttagaagaatgaaactagacccctaactctcaccctattcaaaaatcaaatcatgatggatgtattagtcagggttctctagagggacagaactaataggatagatgtgtgaaccccatttctggtgccaaaatctgtattagtcagtgttctttagagggacagtactagtaggatagatgtatgcataaaggggagtttattaaggattattgactcacacgatctcaaggtgaggtcccacagtaggccatctgaaagctgaggagcaaggaagccagcccgagtcccagagctgaagaacttggagtttgatattcaagggcaggaaggatccagcaatggagaaagatgtaggctgggaggctaagccagtctagtctgttcacatttttctgcctgcttttattctggctgcactgacagctgattagattgtgcccacccagattgagggtgggtctgcctttcccagtccactgactcaaatgttaatctcctttgacaacaccctcacagacacacccaggaacaatactttgcatccttcaatccagtcaagttgacactcaatattaacaatcacaatagattacagacttaaatgcaagacatgacactttgaactagtagaagaaaatatttgggaaacacttcagaacattggtctgggcaaagattttttgggtaagacctcaaaagcacaggcaacaaaaacaaatagacaaatgtgatcatatgaatctaaaaagcttctgcacaagaaagaaacaaatcaacaaagtgaagagacaacctacagaatgagaaaaaatatttgcaaattatccatctgacaagggattagtaactggaatatataaagaactttactcaatagcaaaaaaaaaaaaaaaaaaaaaacaaaaaaaaaaaaaccaaaatcattctattaaaaaaattaggcaaactatctgaatagacatttctcaaaagaggagatacaaatggcaaatagatacattaaaaaatgctcaacatcactaatcatccaggaaatgcaagtcaaaaccatggtaagatatcatctcactgctgctaacatgtgtaattctttttatacattgttggattcgatttgatattttgttgaggattttgcatctaggtttgtgagcaatattaatctgtataattttttgtttcttaatttcttcttttttttcttctttctcttttctttgatttcttgtaatgtctctgtctgtatgtggcattagggtaccgctggcctcataaaatgagttacggaatattccccctgcttctgtctttcaaaagacacagaagaaaattggtataatttcttccttaaatgtttggtaggattcatcagtgagccaactggggtcttggctttctgttttggaaggttattaatgattgtttaatagatataggcctatttggattatctactagcactttccttttcttcctttctttccccttctcatatcttttggatagatggaaggtgaatgatggtatataaatgtgattcaaaattatgtagctgataaaaattgtaacattgatagagaaatataggccctatatgcattatttaaatacctatataataagcataaaacatgtttatgcagtaagtacaaagattaaaggacaatatgaaaagtgtagttaggtgaatcttacaagttatttagagaatgtggaaggctagttaaacagagtgacatacagaaaagaagactagtattaaatcagtggcaatatccttctgtgttcggccactcttgtgttcctataaagaaatacctggctggtgtatatgtgccatattttcttaatccagtctatcattgttggacatttgggttggttccaagtctttgctattgtgaataatgccgcaataaacatacgtgtgcatgtgtctttatagcagcatgatttatagtcatttgggtatatacccagtaatgggatggctgggtcaaatggtatttctagttctagatccctgaggaatcgccacactgacttccacaatggttgaactagtttacagtcccaccaacagtgtaaaagtgttcctatttctccacatcctctccagcacctgttgtttcctgactttttaatgattgccattctaactggtgtgagatgatatctcatagtggttttgacttgcatttctctgatggccagtgatgatgagcattttttcatgtgttttttggctccataaatgtcttcttttgagaagtgtctgttcatgtccttcgcccactttttgatggggttgtttgtttttttcttgtaaatttgtttgagttcattgtagattctggatattagccctttgtcagatgtgtaggttgcgaaaattttctcccatgttgtaggttgcctgttcactctgatggtagtttcttttgctgtgcagaagctctttagtttaattagatcccatttgtcaattttgtcttttgttgccattgcttttggtgttttggacatgaagtccttgcccacgcctatgtcctgaatggtaatgcctaggttttcttcgaaaccatcattctcagtaaactatcgcaagaagaaaaaaccaaacaccgcatattctcactcataggtgggaattgaacaatgagatcacatggacacaggaaggggaatatcacactctggggactgtggtggggtcgggggaggggggagggatagcattgggagatatacctaatgctagatgacacgttagtgggtgcagcgcaccagcatggcacatgtatacatatgtaactaacctgcacaatgtgcacatgtaccctaaaacttaaagtataatttaaaaaaaaaaaaagagaattgtccaagtgagaaagacaaggagagaatataaacattaaactaatgctgaggttggtgcacaaaaaaaaaaaaaaaaaaaaaaaaaaaaaaaaaaaaaaaagaaataactggctgggtatggtggctcatgcctgtaatcccagcattttgagaggccaaggcgggagaataggttgaggtctggagtttaagaccagcctgggcaacaaagcaagactgtatctttaaaaagaaaacaaacaaacaaacaaaaaggaaatacctgagacaggataatttataaagaaaagaggtttaattgaatcatgactctgtaggctgtacgggaaacatagtggcatctggttctgaggagccctcggggagctttgactcatgttagaaggcaaagcaggagcaggcacatcacatggcataagcaggagctagagagcaggggcaggtgcaacacacttttaaatgaccagatcttgtaagaactcactaacacgaaggctgcaccaagccatgagggatctgcccccatgatccaaacacctcccaccaggcaccacatgtagcactggggattacaattcaacatgagatttgggcagggacacagacccaaaccatatcaacctctaatgccagtagaaccactgactagcttcaggatctcaagaaaggattttaaagctcaaatagtcccagcactgtaataattacaggagaaaatgtaactacaatgtttggaagtagcgtctactcaataattgtgattctctgttcttgtccaatcctatgtttaatataaaaactcaactaaaggtaagtaaaagcactggggaatgaccttgccatgtggtattaaggagaagattctcaagcacaactgcctcagttgaaattaccaaatctgcatatagaaggaagatgtgagattttttattcaaagttaactagaaacccagcatgaggcagatggctgggagcagtccagggagtgtccaagatctgacacagaaaatcatgttcggaggggaggcttgttgctcattcccttttgtgtccagctgcctgggttcccttctccaccgttttatttgataataagctatctggagaacttgctgagcccagtgctgagccaagaagagaaatatgtgagctttgaaggtgcagtttcatttcgaggaatagagaatatctattcaaagttggggcagttcagagcagagtgagctgcaaactgttgtgcaggtatggggctggaaggcttcatacaacctcatagtcctgggacccaaacttttattcagaccatggaagcaggtgtgacaagagttgggcaaggcagacctttaattcaccctgataggctggagtgtgggcttatggcatttctcctttgacccaattaacctccactcccaatgtatctctgtgcagaaggctaagctaggtgtgtcagacattgtaaatcctcaacataaattataatttaacctagaatacagagactatgtagcaggaggagaggaaatgtggagatattaatctcttctcccttatcagaaaggaacctagcgtaagaaatttcatgcttaataggccaaagagtaaatcagaaaactccatgggtgatggtatgctcatggtggtggtggtggtggtggggaattctttgccctgtgacctcccttggattaatttgtccccagcacaatgggaaaaaacatttaatcctcggagttttaaaaatttatttatttattttttgcctgagagtgactctgatcctgtttctgacggtcatgttcgtcagcattgtagtgagtaagtcactggccttgtagcttctggagtgatgggagtgatccaagatccccagttcccatgtcacaaatgaggatcccacacatctggggcagcgatggaaaaggaggcatggctggagggttagggtaggctaattgctgctgggatgggagaggatgcagagggagctgtgtccctcctctctatccccagctttggaggaaccacgtgtgctttgtcagctgaagttggagcaacattcaatggtgagtgccctcttacaaacagctcaatgtgaacataatgagaacaccagggtctgctggaggcagagtggcctggtggtaagaactcaggctctggggtcaggcagagctggttcaagtcctggctctgcatcttctaagatgcacatctcttggttagagccttaacctcaccaaacctcagttgcaccatgttcacagtatcccacctctgaggctgctgttggcagtaatgagatgatgtggacagtctcaagaggtggcacatggtcacctctaggaggaagggcatcaggtgtgtgtagaatgtagtgtgggcttggggcaggaagtgagggagtggtgagagatgaagagaggtgaggagaacttctagaattgaaggtagctactcttgttacaaaagcagctgacgggctgtattagggatctctagagggacagaactaataggatagatgtatgtataaaggagagtttattaagggatattaactcacacaattataaagtcccacaataggccgtctgcaagcttaggaccaaagaagccagacctagtcccaaagctgaagaacttggagtccgatgttcaagggcaggaagcatccagcatgggagaaagatgtaggctgggaggctaagccagtctaatctctccacattcttctgtctgcgttttattctggccactctgacagctggttagatggtgcccacctggattgagggtgggtcttcctctcccagtccactgactcaaatgttaatctcctttggcaacaccctcacagacacaaccaggaccaatactttgcatccttcaatccaatcaagttgacactcagtattaactgtcacaaaggcccacagagctggaccccatcccagacgctgactgcatggccctctcctacctctgaggttgtcttgaccacctcaccctcaaaacccctagagtcagccaccgcagtgcagctgagctcactgggggtgcttctggcattctgagtcaggggatagcgggcctgatgtcaggggtgaggagagctggtcctgggggcagtgtgctgcagtgggagctggacaaatcccctgatccttgggggctgaaacaggagctggaaggagcctgtgtcaaaacatggacctgggagggtttccaagtttagagaagcctggagcccgcttgaggactggggatcaggcatttgacctcctccaccacccagtagcctctgagacactgacatagctgcgggaagagctaagtagcaataatgagcataatttggagactcaggagacaccatcctagggacccaggtcgtcctcaccggcccctgacagctccttgcttgggtctcccagtgacctaggaacaggctgatgtgaagtgcaacccagacttcatcctgtgccaagtattctgggaagtgagaggagggtgcaggggtcatagagggtctgcctcattcagcaccagggacagcgatcgaccccggactccttggcctctgtggctgcagggacactggctcaggtgcatcccatacactcctgcagttcagagtccaaggcgtgagcaccttgcagggtcccacagagtgggggcttgggaggaaagatgacaccatggactggagcagagcatgagttgatgaggacaggaccacagctaggatatatagcaaatgtccagtccagaaaccatggaaccagagttaaggaagaagcattgtgctgaaggaaggcaaatgtactcaagaatcccccagaaggatggagtgaagttctggtaaagggaatggaaatcaaggaaaactcaaagacagaagggagccagaatatgggtgccattgaatgtcctgctgaggaattaggactaaatcttctagacagtgtttctgccagtgtgccctttgggatgctagacacctcagataatatatattcagaggactctggatatcactaagcttggcaaaatgacacattgtccattatcctcctaaaaattcacaattattataacatattaaaagtactatgactccctgcaataaagaacttcctgtttcatattgcttgatccataatttagacacacacacagacacacacacttgcaatttaaaaaaaaacagtaggcatgacaataggagaaatgacagccagtttggtttatgccaaaattagacccttgaggcagttgagaaattgtcttgttggaaaacctctccaagctccagaaaggggaatttacaaggtctcaagtattctcaaagcccaaaaagagtttcatgtgaaagttgaagctgagccatctttccacttgtaaatgtccttcaggtaccatctcctgaggtcagtgcaataatagtcaccatctttagttggagtgatgaaattctgcctaagaaaaagatatagtcaagagatatgtgggaccatagctaagaccaggggttgggtcgtcttctaaaaagaacaagacacagtggaccccacagacaggggccattgtcaatgtcacagttgaatgtactggctgaatgctctggcttgacatccatcagaaccattattaaggcgtatgtgatcattcaactcagacacatatgacactcaagcaccttgtctgaaaatggagaaaacaatgacattcgcctcaaaggctcagtgaagaaataagggcacagtgtagtgcctagctgagtgtgggataagtggtaattaagaatattattaaatggtattgataaaaaggtaaggagtttggctctacccagtataaatggttaggtgaatcaactagtccactgacatatatggagtcctgctgagtgtcaactcaagttccaggcactatggactcaaaggtgagtcagatcaagcccttgcccctggaagattgctcatgtgtggggtgatgcacctgtgatctgacagcacagtccagagttgcatcctgaaatgaaagcaggtgctgttaacattagcctcccaattggcagatggaggtgcagagagatcaattcactttaccaaagccacacagccaggaagtggatgagccaggatttgaaccttagtctgtctgagatgagtcagtgctgtgaagcaaggagctatccaggctatgctacaagtctccccttaatcattaatctgtgtttaagaaactgaagagaaacaaacaattcgcaatggtgatcagctggtctctgtttaaagaagaaaacaagcccctggagcattcaaccaaagtgatgtcatggggtctccaaaccaggcaattagtaaaatttatctgaacctgccacctccagccctgctctaaagctctcagtgcacatcgttcaaagcccccaggtatcttttctggaggacacagcagagaagaacatggttagagccttgattggtattaaagatcccaatgggacaactgtctgcacaactcgccaaactccactgcataacaatccccaggaagccaattctaagttttgatagtgaacaagccatgggattttcactaacacctggtgactcattaaaagttgacacacaatttccatctccacttcattttttttcttttttttttttttgcaaatgaaagggtctctaaggatcagctacagagctgcagggaggttaggtttgaatgcatagctcagggattaagtggagacagaaacacggctcatcttactctggggaaatggtcccagagagttttccatttagcctcaggtccaaacttaggtgtctgattagcagcaagagacataggtaggcattggaagtggctctttcttccccaagacactatagtcccagagctccacatagccaaatgttacagaaagcaccacagcatcttggacatcagaaccaaagtatgcaaagtacttggtgccaagagtggcccctgtgagcattttgtgctgcccgatgggatggagggtaaggtctccagagctccgaggtgggccaggcttctgcttcctccatcctaatacttaccacactctccttattatataaatgacttgttcaatacctactatctttctctactcaacgttccccccaagaagataaggccacactggatttgcccaaccttgtgttctcactgcttggcacctaatagatgctcaataaataatcgcagagaaaacaaacaaatgactctctcattgcaaccccattccatgtctgtgagttgcaaaacccttctaaaatgtggatggctattctccagttaatctgaaattcattttgtagatgtagttgacatcatttgaacccacctgcccttatgtgtgtatcccctgtgtcaactcaggtctgatggattatggggaaaggtcctttggatgcaaacctctgcctgtcttttaggctccttgagccactcctcactcctagctgcccaaggccccttccatattggccttcttcggttccttggatgagcagtcattttcccaccctaagtcctttgcacatgcccttccctctgcttggtgcacaacctttcctctccctctgcagaatgactcaaatgaagtgctacctcctccgtgaagttctctcctatcagcctgtcctgctttctgaggattcatttgcctactcctgtagccactaccatcccttccttatgctcctcctgctcttgtctgaaattcagttattcatcatctaccttctctcctccactgtaaagtccacaagaacaggcactaagtctgcactggccattgcagtgtccacagctcctggctcagtgatgagctccaatgctctggatacatctgttaagtgtgtggtagctgaggctgaacttcctctgagctggagataagagttatctcatgcacagtctttaggggttgaggctgatcactctcatcatcttaagcagccagtgtggctctttctatttctccctgttaccaaagagcagatcaagcatgaggttacctgtttctactaatatttattgtcaggcagtgcttatctcagatggaggagacctcttgagcaagaagttgaccaagacattgaagagcccttcaacccaactcagccttccgatctttagtgaaaatgttatcctatgaatatttatgacacacctaatatgtgctagaatggtgactgcgacctggattccacctctaagagcttctgggcaaagaagggagacagaccagtgcatcagtcattcagataccgcaagataaatgcaatgaaaatgctgcaggctcctgcttacagcccttttcccttctctgaaactcattgaggtgaaaagatccaaaaaaggaattcatctagaataaattaccattaatactaaagagaacctgcgtggcttgtttcacttgacacaatgtcttctaggttcatccatgttgtcgtgaatgagaggatttccttctttttcaaggctgaatagtattccatgtgtatttattacctcatccatttatccgttgatgtacacttaggttgattccatctcttgacttttgtgaatagtgctgcaatgaatgtgggagtgaagatatctctttaatatactgatttcatatcctttgggtatatactatacccagattatatgatatgctggatattatatgctggattatatgataattccatttttaattttctgaggaacctctatactgttttttataatggctgtactcatctacaatcccacctacagtttacaagagttcccttttcttcacattcttgccaacattttttttatctttcatctttttgatgttggtcaaagaacataaaatttcagttagacaggaagaccaagagatctagtgcatcatgatgactataattaataacaatctattgtatatttgaaaattaacgagagtagattttgagtattgccatcacagaaaagaatgataactatgtgggataatgcacatgttaacagtcttgaatgaaccattccgcagtgtatacagatatccaaacgtcatgttgtacagcataaatacatacacattaaaaaaatgagtatctgccagatttcatgtatttgggatcagatggaagaaacagaggaatttgtcgcacagtccctgactcaagggcagaatgcagtgaaaggaagtagatggagaagatgtttctttttcttttctctttcttttctttctcttttctttttcttttcttcctcctttctttctttctttctttctttctttctttctttctttctttctttctttctttctttctttctttctttctttctttctctttctttcttttctttctttctttctttttttggagatacagtctcactctgccacccaggctggagtgcagtgatttgattgatcccgggtgaaagttgcgtggggggaacaccgtcgtgtaccatcctcggcgcgtctccgtgagtggtgctgcgagtgcgcatgtctgcacgcatctccaggtgtgcatggtgccaggacgctctgcaggtgcgtgtccacctccgcgtgcagggtctctgcctctgtgagggctcaggtctgaacattcttgctagtgcgcgcgcgtgccggttgggtgcacgcttggtgttggcgacagagcctgcagcacgtggggagaggtggcaggcggatgcaggtacatggacaggtgtgtgagggacacagtgggcacccgtgtctcagtctgtggaggcggaagccgcccatccctgagctttcctgaggagcctccccctctgctttcagacacagctggggtggggctcagcgctgtcctgggcgggagcaggaaggctgagccgggacagcgctgtgggttctgcctcccttagctccggactgaccctgggcaccccaggaccctctcccttcctgagcacaggctaggctgtgaacacagtgcagagacagggagaggtagaacaaggctgagggtggcccacggtccattttttttttttttttttgagatggagtttcgctctgtcacccaggctggtatgcagtggcgcaatctcggctcactgcaacctcctcctcccgggttcaagcaattctcctgtctcagtgattctcctgtgattctcagtgattctcctgcctcagcctcctgagtagctgggattacaggcatgtgtcgccacgcccagctaatttttgtatttttagtagagacagggtttcaccaggtcggccaggctggtctcgaactcctgacctcaggcgattcacctgcctcagcctcgcaaagtgctgggattacaggcgtgagccaccgtgcccggccccatggtgtactttttaaaaattgaaataaaattctcataatattgaattaaatagtataaagtgtacaatttagtggtgtttagtacattcacaaggttgtacaaccaccacctctatctagtttcagaatatttttgtccccacccttaaaaacccgtacccatgagcaatcactccccattcccccctcccagcccctgtcaaccaacacctgctttctgtctctatggattggcctgttctggacatttcatagcaatgggatcagaatatatgtgactcttttgtctggcttcttccactcaatatcgtgttttcaaggctcctcattttgcatgggtcatgatccgtgttgcatgggtcagtgctttattcctttttattttttataggtatatagtaggtgtgtatacttatggggtacatgagctgtttggacaaaggcatacgatgagtaataattacatcagggtaaatacaggatccatcacctcaaccatcacctcaagcatttgttgtttctttgtgttacaaacattccaattatatatatatatatatatataatttttttttgacagagtcttgctctgtcgcccaggctggagtgcagtggcatgatcttggctcactgcaacctctacctcccaggttcaagtgattctcctgcctcagcctcccgagtagctgggactacaggcacatgccaccacacccagctaatttttgtatttttagcagagacggagtttcactatgttggccaggatggtctcgatctcttgaccttgtgatctgcccgccttggcctcccaaaatgctgagattacaggcatgagccaccacacccggcctccaactatacttattatattaactaattatatttagctcttataaaatatacattaaattattgttgattgtaatccccctgttgtgatatcaaatactagatcttattcattctgtctaactatacttttttacgcattaatcatccccactcccccccagctatgtgcactacccttcccagcctctaataaacatccttctgctctctatgtccctgaaagcaattcttttaacttttggctaccacaaatgaatgagaacatgcaaagtctgtctttctgtgcctggcttatttcacttgacataatgacctccagttccattcattttgttgcaaaggactggatctcattccttttttgtgtctgagtaatactccattgtgtatatgtaccacattttctttaactaattctctgttgatggacacttaggtttcttccgaatctgggctattgtgaatagtgctgcagtaagcatgagtgaagaaatctcttcaatgtactaatttcctggctcacatctgtaatcccagcactttgggaggctgaagtgggtggatcacttgaggtcaggagtttgagaccagcctggccaaaatggtgaaacccctctctactaaaaatacaaaaattagctgggtgtggtggcaggcacctgtaatcccagctaagtgggagggtgatgcaggagaatctcttgaacctaggaggtggaggttgtagtgaggtgagaatatgctattgcactccagcctgggcaatacagtgagactgtctcaaaaataaaattatgattttctttctttagggtatatgcctagcagtgagattgctggattgtaaggtagttctattttagtttttgggaaacttccatactgttctccatagtggctgtactaatttacatcgccaccaacagtgtatgaggattcccttttctctgtgttctcacctggattctctatcttttggacaaagctatttattgtcttctatcttttagataaaagctgttttaactggcatgagctttcaaaaatttagattaaatttatttaacctgaaattatcctttaaatattttaaagtggacaatcagtggcatttagtacattaacatgttgtgcagctactacctctagttacaagacattgtcaccattccaaaaagaacttcatatccattcatcagtcattccccatcccacgctagccccattccctgacaaccacacatctgctttctttctcagtggatttaactattctggacatttcttataaatggaattatatactatgtggccttttgtgtctggcttccttcactcagcctcatgttctcaaagtgcatccacgctgttgcatgtatcactgattcaatctttgcgtggttgcataatatttcattgtgtggtcggaccacattttgtttatccattcattcattgatccagtttgcattgtaacataaacttttgtattttgcatctagcctgtttgcagactggcaagaaagagagtgggagaggagtcacagcctcctagtttagtttgttggggaacttccataaactaaataaagtagaagggctcctattggtgcagggaggagagctgccctggcagagaaattgggcagatctgactctgtggccactcagggaaggtgatgagagaagccatggctgatagcctaggtttttgctgttaggtttgggattggaggattggggttggggtcaaaaagaggaggagaccagcagagtcacgtagtggaagcatgctgggcccatagcctagaggtcagtggaccataaccattttctgctaagaagtttttgactgggcatggtggctcacacctataaatcccagcactttgggaagctgaggcaggctgatcacttgaactcagaagttcaagaccagcccgagcaacatggttaaaccccatctctactaaaaatacaaaaattagccaggtgtggtgatgcgggcctgtaatcccagctactcaggaggcggaggcaggagaattgcttgaacccaggaggcggaggttgcagtgagccgagatcatgccactgcattccagcagggacagagtgagactctgtctcaaagaaaaaaaaaaaaaaaagcggaattgtgatagagaaagagtaattcacacagagctggctctgcaggggactggagttttattattactcaaatcagtctccctgagcacttggggagcagagtttttaaggacaacttggtgggtggaggggaagccagtgagccagcagtgctgattggtcagagatgaaatcaaagctgtcttcttgcggagagtcagttcctgggtgggggccacaagatcagttgagccagtttatcgacctgggtggtgccagctgatccatcaagtgcaggatctgcaaaatatctcaagcactgatcttgggagcaatttagggagggtcagaatcttgtagcctccagctgcatgactcctaaaccataatttctaatcttgtggctaatgttagttctacaaaggcaatctaatccccagacaagaaggaggtctgctttgggaaagggctgttatcgtccttgttccaaactataaactataaactataaactaaatttcccccaaagttagttcaccctatgtcctggaatgaacaaggacagcttggaggttagaagcaagatggagttggttaagttagatctctttcgctgtctcagtcataattttgcaaaggtggtttcaattttccaggggagcaatgaggctcagagaggggaagcaacctgccctgcatctcacagctagaaagcagtggtgccgagaattaaacagagtctggacgtttccatgacatagggaagagatgacttccagctgaaggtggcaatcagggagcagcttgctcataaaattcaggtaggatttggacccataaagatagggaaaagcatgaaaagaccagcatgaacaaaggcagaaaagcaaggtgtaggtggtggtgcatggatctaataatcgtgatggcaataacaatagcagaataattattactatcaacatttataatttattaaattcttactttgtgtcaggacctgcacaaagcacttaaggtgagtgatcttatttaaacctcaatacattattattaatgcctttctgcagatggagtaaccatggcttggacagatgaaggaggcgctctcagatgtcctcccaggcaggaatcactagacacccccatgctcctaaccactgggtcttctttcctctcttccccaactaggggtggccgtcatgctggggctaaaccacacctccatgtctgaattcatcctcgtcggcttctctgccttcccccacctccaactgatgctcttcctgctgttcctgctgatgtacctgttcacgctgctgggcaacctgctcatcatggccaccgtctggagcgagcgcagcctccacacgcccatgtacctcttcctgtgcgtcctctcagtctccgagatcctctacaccgtggccatcatcccgcgcatgctggccgacctgctgtccacccagcgctccatcgccttcctggcctgtgccagtcagatgttcttctccttcagcttcggcttcacccactccttcctgctcaccgtcatgggctacgaccgctacgtggccatctgccaccccctgcgctacaacgtgctcatgagcccacggggctgcgcctgcctggtgggctgctcctgggctggtggctcggtcatggggatggtggtgacctcggccattttccaactgactttctgtggatcccatgagatccagcattttttatgtcatgtgccacctctgttgaagttggcctgtggaaataatgtaccagctgtggccctgggcgtgggcttggtatgtatcatggcactgctgggctgttttctcctcatcctcctctcctatgccttcatcgtggccgacatcttgaagatcccttctgctgaaggtcggaacaaggccttctccacctgtgcctctcaccttattgtggtcattgtgcactatggctttgcctctgtcatctacctcaagcccaaaggtccccactctcaggagggtgacaccctgatggccaccacctacgcagtcctcacgcccttcctcagccccatcatcttcagcctcaggaacaaagaactgaaggttgccatgaagaggaccttcctcagcacactctattcctcaggcacctgagtagctggtgtggaagtgctgatagaatatgataggaggatgaccatcaccttgtctgcacagtgtggctagtaatgcttaccttgtaaggcaggtgtaaagatttctgtatatgacaacactcatcacatagtaggtgctcagtaaatgttaaaagcatgtttacttccacaactcttgatctgtatgtctttatctgagttttaatttttgagttatagtagctttattaagatgtaattcacctaccatacaatgtacccattagagcgcacatttctgtggtttttgcgtattcagagttatgcaaccatcatgacaatctggcttagagtattttagtcatccaaaaaagaaacccaaatcctagtgctttggaaggctgagtgggagaattgtttgatgtcaggaattcacgatcggtctggacaacatagtgagatgccatctacacacacacacaaacacatacacacacacaagttcttttttttttaatttattacactttaagttttagggtacatatgcactacgtacaggttagttacatacatatacatgtgccatgttggtgtgctgcacccattaacttgtcatttaacattaggtatatctcctaatgctatccctccccactccccctaccccacaacaggccccagtctgtgatgttccccttcctgacacacacaaaaattctgataattagctaaatggggtggcacattcctgtagccccagctactccagaggctgatgtgggaggattgcttgcatccaggagttcgaggctgcagtgagccatgatcaccactgaactctgacttgggcaacagagccaaaccttgtctcaaacaaacaaacaacccatactcattatcagtcactctctgtttcctccaaatctccatgccctccagccctagggagccactaatctttctgtctggttagagttgctttttctggacgtttcacatcaatggacaactgtaaatataattcttttattttcagatgaattgtttcactgagcataatgtttttgaagttctcctacattgtagcttgtatcagtacatcatcttttttttttttcaagacagagtctcaccctgtcacctaggctggagtgcagtggcatgatcttggctcactgcaaccttcgcatcccaggttcaagtgattctcttgcctcagccttccaaatagctgggattacagatgcctgccaccatgcctggctaatttttgtatttcagtagagacggggtttcaccatgttggccaggctggtcttgaacacctgacctcaaacactccacccacctcggcctcctaaagtgctgggatttcaggcatgaaccaccgtgcccagccagtatatcattttgattgccaaataatattccattgtatggaaacactacattttatttacccatttgtcattgatggacatttcagtgtttctaatttttgctattttgagtaatactgctatgagtgatcagtacaagtgttgcaatatatgctttcatttccttgggatatatacctaggagtgaaattgctgggtcaagtggtatttctatgtttatttttttaggaacttccaagctgtttcctaaagtctatgcaccattttacattcccaccagcaatgctgcaggggtctaggtctctgcaacctcaccaatacttgttactgtctttttgatcacagccatcttcgtgggtgtgaagtggtatctcattgtggttttgatctgcatttccctagtgagtaaggatgttgaacatctcatcatgtgcttattggctatttagatatgttcttggagaaatagctattgagatactccacccattttccaattgggttgtttgtatttttgttgttaagttgtaagaatgctttatatttttagttaagactcttttatctgatctgtgattttcagttatttccttatagtttgtgggttgtgttttcatggtctttttggtgtctttctgtagcacaatagatttacattttgataacatcagtgtacctatttttttttgttgttgcttgtgcttttggtgtcacatctaaaaaaacattgtattgctttatctaaggtcatgaacatctacgttgcctcataagagttttgtagttttagctcttacatttgggtttttgatatattttgagtgtcaaactttgtgtatggtgtgaggtaggggcctaatcttagttttggctgggttcagtgtggttgaatgaatcctgtctgtgaacttccatcagtgacctatgtctgtgattatataagtttgtgaggatgaggaaataatcatcacacacacacatggccctaggcagacacatcattcatactgaattagtaaacacacttcattcccagctactaggttgcttcccatgctgttgcacagcaatagtaaaataataatggtagccactgtatgagtgtctactgtatgttgagctgtatactatgtccagcacccttcatagatcatctcttcatttctaaaactgtgtaacaggtaaaaagacaagtgtgccagcaaaaattgcttattatttttaatttctcaaaggttttgagggagattgagttctagaaagagatttctctatacaagctgtggaaagtgggcatggtggctcatgcctgcaatcttagctacttgggaggcttaggtggaaggttaacttaagtccaggagtttgagaccagccttggcaacacagggaaaccccaattttacaaaaaaaaaaatacaaaatattagctgggcatgtttgcactagcctctagtcccagatactcaggaggctgaggcaggaggatcacttgagcccaggagattgaggctgcagtgagctgtgatcacattactgcaatccaacctgggtgacagaatgagaccctgtctcagaaaaaaaaaaaaaaaaaaaagactgcctcgagcctagtttgctatatactacttgtacttgctgacaaattggattgtgcatctaattttatggctttgtgaacagaacgtgcctagtccaggataagcatattgggttgtgtccttaatggggctcagaagtgagtgaagccttattgtcccaggaaagaatagtgatttcttgctctaacatattaaacatttccactgtggatctcctattgagctctgcaaggttttacacaacatcctcattttccagttgctcagagcaccattaggtctgttggattttgagaaataaaaataaaatcctaaggcccccaaccaactgaacagacaccctcttgaacataagaaccccagagaaatcttaaaaaccgtgttcccagctgtgatggaaggagaggttggctatccctcagtatggcccttccttatcaatctttaaccagaattctccatccctgtctcctttgagactggaatcttcccatcctttgcatgagctaaaatctccctgggcagagaggtagcagtgagccctgtgtgctggaggaagaggtggaggctgcaggttcctgaatgctccctgaggctcttcctggcctctccagacccagaggacagcctttccagcgtggtttcctgtagaggcccatgggaatgacctgctgggaaggtcactgcaggaataaagctcacagcaccagttcaaggaggccctgggtctggctcctacacttgcctgcaggtgtcctgtgaaaacacctaaaaagggtgttttttgtgccttttccttagagccacttcattgaaggcagccccaggtggaggtggaccaagaggaggagggtataagggcagagtcagagagctgtggatggagctgcccagcctagagttggggtgcagaactggggagacgaggaaaagagagagatctcaactttagttgacttcctggggccttctgtgtttgcccactcaagatgcctggttgtttagtgagcccaggcactcatatcagttctcaactggacgtgattctggccctcaggggtcaattggtcgtgcctggagacggtttggttgtcaggacttgtgtatgggggttggggggattttcctactagcatctaagagattgaggccaagcatgccactaaatgtcagacaatgcataggacagctcccagcacaaagaatgatccgtcccaaacctcactagtgctgagactgagaaacgctgttctaggtatattttgtcttcactgttgtgcccctgctaacctgggggcaaggctctgtgggagggcaggatgcactccagtgctgtgagatgtttgctcagcctgtatgtatgagccatctgcaatgataccagagtaggcagaattctgtccacttgtcagaggagatggggaagccgggccttgagagctgtggctgctccagtaagcaggaggtgggatgttggactgtaggggtgagacaggggcttgaggagagggggaaggttagatgagactcttggttggatcagacactgtgttgtgtcattgccagaaatcctaaggaccctgctggggtcagagaattagcctagaatggggtcagcaagtgacatttgtaacagaacaacacaaacaaaccagctcagaagaccaaaatcattatcagtcaatgacaatgacttttgcaaggtggactctcacagtgctctggttactcctgtttttcacttggggagagtagcctcgaagctgcaaagtcgtttctccaaagacacacagtgatggctggggtttccaccctgagtctgatgcctccacaacttgtaaacatttcaggaaattctctctggaagccagagtggagtgtgtgcagaggagaggagatgaggaggatggggcagtggcccaggagaggggatggagaggaagggagcagatggagaagtgcttagtaggagagagggcgcccagcaatgggagggatggggaaggaagatggctgatgctggagtatggtttctgggtagggcagcttcgtggtcagaagactttccttccgtgtcataagtgtggtcttttcatgtgggatacgtcatcctcactccagtaaagttcctcactgtccgggtgattctgtgttctccaagcgcctgactgactcctgctttggtcaggggatacttcagacaatatcctagtgagactgctagggggatgtaatgatgaatgggcccatccagaaagaaagatttcagaaactcttgtagcaatgtggctcacattattcataaaaatatttgtttcttttatggtagaattcaggtgcaaaggtttgagtccatgatattttcagtttgtggcttttgattaacattgatttgcgaaagatccttctcttatttcatttgtttcactttgtttccgttctttgacaggcattttcacacacttagtatgcactttttgatttgtatatgttcttgtaagaaacacattgctttctgtctgcacaaaatttaatgtgactattttaaaatggtaaattaatggacttaattttattagagcagttttaactttatagaaatattgatcagaaagtatagagagttctcacatacgcttcacccctgcatgtgggattgtctctcctattattgacatcttgcatttctgtatcacctgtgttacactcgatgaaccaatattgatgcattgttattaactaaatttcatagtttgtattaggttatgctctttgcattgtgtatatggattttgacaaatgacatgggttcattattactatatcattcagaatagttttatgtacatatattcttaatgtgtccacaagagttcattctgtttttttgtttttttcactcaatattattttaaaagttcatttatattactatgtgtgcatctaactcgtgacaaaagctctatatccttttgcctctatatccgttgtttgcctctatatacttttacctgccttctccccagttagggacaagcaggcttatccatcacccccactaaaataactgctgcaggaaacattcttttacatgtccccctataaacaggtttcagaagtcaagatagatatacagtagcaaatttgctggtacacagagcatgaatcccattaaaaattttaatttccaacattctacatgcccactaatagtatgtaagtatttccccttccccttcccctccttctccttctccttctgcttcttcttcttcctcttcctcttcctctgatggagtcttactctgtggcccaggctggagtgcagtggcggcatctcagctcactgaaacttccacctccaggggttcaagtgattgttatgccttagcttcccaagtagctgggattacagatgtgtacctccagcctggctgatttctgtctttttggtagagacagggttttgccatgttggcatagctggttttaaactcctggcctcatgtgatcctcctccctcggcctcccaaagtgctggggttataggcgtgagcctccgcgcccagcctatagtgcgtaaatatttctttctcctcatagcccaaccaatactggacattttataattttgggaattgcataggtatacagtgaaattccactctctctttcattttccccttccctccattcttttcctttttgttttctttttcttttttcttttttttcgagcatcctttcatctgcctgagtaattcctgtgcattatcttctcacatcttttgctcgtttttgcattaagatacctacttcttcttgatataactggttccttgtttgttctagatataactctcttgtcagtttttaagaaattccccacaccactggatgtgctcctgtcggttttagacaatgcaaataatttttccccatttcccatctgcctgttaacttcatcctggaaatcctttgttgaatggaaatcctcaatgttgatttttttaatgttttaaaaatcatcttaatgattgtgctttggaaattttgtttaggaagtctttcctcaagcctagatcacaaagttattctcctatactttcttctcttaaatttacaccttgatatttggtatttatttcttgaatgcatctggatcctcctttgtatgtagagtttggcagaaattcggattgacttgcttcataaaatgagcagttttctcactacaatgggtgaacaacctaccttctcctcttgatttgtgccagtacatttatcgtgtactatattaggttttgaataatgcagggttattttctgagatttccaatcgacttacccagacctaggtctgttccacgtttcataattttaaaaatgactatgactctattgtgtgtctcagcgcgtgggagggaacagctcttcccttgattccatatttatttatttatttatttatttattttagacagagtctcactctgtcacccaggcagcacactgcaacctccgcctcccaggttcaagcaattcttgtgcctcagcctcccaagtggctgggattacaagtgggccatcacacctggctaatttttgtatatttagtagagacgggctttcgccatgttgctccggctggtcttgaattcctgacctcaagtgttctgcccagctcggcctcccaaagttctgaaattacaggtgtgagccaccgtgcctggcctgatatttatttttctgaaggaattttcaaatagttttatcaaatttacagttgattcactggaattgtaaatataatacaatattatattattgagtattattaagtattgaggttataatttgaggatgaattgacaccattagcacatcaggccatcccagccaagactctatactgctccccatgtgttcagatcatcttctacatttttattagtatgtatttaaaattttttctttggagctatgtcatgtttttggttaattcctagatattttatagcagattttttcaaagtgtgacatgaggacctctgcagagtggtccctgaaatccttatttttcaaatttacatgtgagaatatattttcatcatatgcttcaatatattgccacagactgaatgaagaggcagatgaaaccatcaagctgtttcctgccaagctaggacatatgaggtattggctaaaatgtcaaacaaggccactcttctcatgaaatgcttttttcctaatgtgattatttgcctgaaaatgtttcccatattagcattcaatagacttactattgctctttagaaatttttttttgagacgaagtctcactctgttgcccaggctggagtgcggtggcatgatctcggctcactgcaatctccgcctcccgggttcaagtgattctctggctcagcctcccaagtggatgggattacaggcgcgtgcccccatgcccagctaatttttgtattttttgtagagacctggtttcaccatgttggccaggctggtctcaaactcctgacctcaagtgatccacaaacttcggcctcccaaggtgctgggattacaggcgtgagccaccgtgcctgggcatgcttttttaaatatactaataactaaatatttttaataattttcaattttcatttccaatatggtaaaaatggatagttctaaaccacataaacaaaagccctttagagtgcttagtaactttgaggtgtaaagggatcctgagcgatgtttctttatattaatagtttgtgttgctattgggactgttctctttctctgtattcagattatacttcttgaatgcttgttactggtgtgatactaggaggatcactggggtttttgccagctgaccttgccttctgcatcactgggctctgttgctgttctaatacatgatgtcatcattctttcatcttttctaggtagatgatcacgtctcttcccttccagtccttagataccttagataacttgtttctttcccttaccttataccatcactcacgaatttcagctccatgttaaagaacagcggaattagtgagtatccttggctttttcttgactctaaagtgatgcatggaaaagtttcttcttcagtgttgtatttgctaatttgtgctatatattctatatctagttaagaaagtctccttggattttgtgttgtgaagtgtttttttttaaatcataataggagtagggttttagagaatgtatttatgccttgattgaaataatcatgatttttctttttaaatcgattcctgtgataaattgtatgataggttttctgatgttaaccaatcttgtcatttatggaataaaccaatgccacttgatcatggtaaactatttttaatacaccattagatttgaataggttatgttttattctggaattttaaatctgcctggataggtgaagtaggcctataattgtctctttttctcggtgaagattcttgcctgattttagacaaagattgcattaacttgaggagatgtgtttgtcagatttcctaactcttttctatttttttgaagatcatgtgtaagattctaaccaactgtttttttttttaacagtttaatagtacttaccgcactttaataaaacccactggggcaaagattttagagagacgatctttgactaccgtttcaatttctttaaagcttatttgagcatatagcatccccttttttcttgcaccagttttggaattttatatttttctaagtacttgttcatttcatctacaatgtaaatttgttatttcttttactatttttattaatttaaaaatatcaattatctctgtaattatttcccatttgtaattttgggttctgttattggtaccttctccttgtttatcttattaattttttccaataacttgattttgattttattatgcatgatttttttcttgaggcagttttttgataaaggtattttgagctgtatatttccttcaaagtactattttaggttaaaatgttgacattcaatatttaaattatcatttaattctaaatattcctccattttatgatttactgttgaaactgtagattatttaattatatagttatcttccaaacacatgagatttgtaaagctatttcttccctattgatttttaatgttaattcattataatctatatcatattattatgctttggaattaaataaatttttatattctaatgaaatgtccatttttgtaaaagtcgctgagtggttgaaagagtgttaattttctttttggtgaagagtctaatatatataatagctaatgtctggatattattaattgctttgtaattaataattaataaattgcatttctgaactctgttaaaatttctaactataataatctatctgccaggtgtggtggctcacacctgtaatcccagcactttgggaggctgaggtgggcggatcacctgaggtcagaagtttgagaccagcctggccaacatggtgaaaccctgcctctactaaaaatacaaaaattagccaggcgtggtggcacgcgcctgtaatcccagctattagggaggctgaggcaggagaatcagttgaacctgggaaggggaggttgcagtgagccgagattgaaccattgcactccagcctgggtgacagagcaagactccgtctcaaaaaaaaaataatcaatctgccgtcgatttggctatttctatctatctcactgaagttgtattgattatttgttaatgaatattccaggatatatagttacatggatttatagtattgatgctgtttgctatgttcttttaatgggtataaatgttattctctgtcccttagtgtgtgtgcatgtgtgtgtgtgtgagatgtaaaaatcttggtatgcattgaaaaactaaacatttaccttcatagtcaaaataaccagataacacttacaaaaataattagctgagcatggtggctcatgtgtataatcccaccactttgggaggctgagacaggaagattgcttgaggccaggaattagagaccagtttgggcaacaaagcaaagccctgtctctacaaaaaaaaaaaaaaaatgtttaattagacaggtgaggtggcacacatctgtagtccagctatttaggagactgagaagaagcataacttgagcccaggagttccaggatgcagtgagtcatgatcctactactgcactgtaacctagggggcagagtgagaccttgtctctaaaaaattcacaattagatcaataataatgctttaatattactcatacgtaatcattcattcatactgtaatcaaaatgttctctattgccttaaaatacttacagctggttatgtagatcaagattcaactagtcccctatgttgcatccagttactatgtcctggaatctctcttatcctttcaatatacctctatcagtgaaaccagaccaattgttctgtggaattatccaccttctggatttttctgaaagctttctcattatataatttagcttgttcctccatcttctgtacaatgattattgtttttgactagtgggcatcttttcaatctggtacctgcaggcttttaatattatcccattacttagtgaaaatttcattttacactggtagaagatgtccaaggctttcttccatgtccagaccacagatcagccatgtgttaaggaactctacttccctgtagaggtgtattgtattagagaccttgcgatcattgtttccttaaattccacttttttattaaggttgcagcctcagctttcatttggtgcatattcttcagacatatatttacccatccttttatttttgaattttctattcagatttattagaatagtaaatgtgtaatttgaaataagatggcataaatgagtatcaataaatgagtattaaaataaatgtaaacgggttaaataagcaattaaaagacaaagactcttggggaacaaaaatttaaggctcaagatcaaaataaatgttttctagaactggcacattttcaggggaatctgaccctgatcatccatgcctgtctctaatggctccaagtattgaaacttttctttatgttagtcagtgttaatggaaacccaattagtagccaacatctgacttggtcatctaatatattgatctcgtttgatctttgtcacattgctgaatgttaagaactattattatttactccatttaacagatgaggaaagtgagacccagaaagttccaccagttgttgaatagcatagagctgttgggtttccatttggtctgtgctagagtctaagttttaaccactgtcacttaattttgtttctgatctcaccagatacagtatccatgcctggtcagaactacagaaccatatctgaatttatcctctctggcttctcagccttcccccagcagctcctgcctgtcttgttcctgctgtacctcctgatgttcctgttcacattgcttggcaaccttcttatcatggccacagtttggattgaacgcagactccacacacccatgtacctcttcttgtgtgccctctccatctctgagattctgttcactgttgccatcacccctcgcatgctggctgatctgctcttcacccatcgttccatcacctttgtggcttgtgccattcagatgttcttctccttcatgtttggcttcactcactccttccttctcatggtcatgggctatgatcactacgtgaccatctgccacccactgcattacaacatgctaatgagtccccgtggctgtgcccatcttgtggcctggacctgggctggtggctcggtcatggggatgatggtgacaatgatggtttttcacctcactttctgtgggtctaatgtgatccaccattttctctgtcatgtgctttccctcttgaagttggcctgtgggagcaagacatcatctgtcatcatgggtgtgatgctggtgtgtgtcacagccctgataggctgtttgttcctcatcatcctctcctttgtcttcattgtggctgccatcttgaggattccttctgctgagggccggcacaagactttctccacttgtgtatcccacctcactgtggtggtcatgcactatagttttgcctcccttatctacctcaaacccaagggcctccattctatgtacagtgatgccttgatggccaccacctatactgtcttcacccccttcctcagcccaatcattttcagtctaaggaacaaggagctgaagaatgccataaataaaaacttttgcagaaggttctgccctctaagctcctaatggccagtttggtggtgataaaatataatagaagggctggggataataatgtgtatctccataggactgttgtaagggttcaggtatgtgaaaatacctgaaaatatgtgttttgtacctactagctattgttttccccttcctttttgcttaggctcatgtgatcatttatgagccattgtaacgaactttatcccattatctgtgcctagaaatgtgttttctatctgtggataggtggagatcatcacgtggatgtgtctgggcatttatgcacatggttcttcttaaacagacaggcaaaaaagattttattttcccctagtgtaagaaaaagcaagaataacatcatagtcataaatgccaccaagcattgaagtttttctatgtatcctgtactgtgtccagtgttttacaaatattatccttttaattagaagaaatgaacaaaggaaaataaactatttgtctcagagaaactggtttctgtttttgttttgatggagtcttgctctgtcaccaggctggagtgcaatggcacaatcttggctcactgcaacctccccatcccgggttcaagtgattctcctgcctcagcctcgcgagtagctgggaccacaggcgcgtgccaccaggcccagctaatttttgtatttttagtagagatgggttttcaccatgttggccaggatggcctggatctcttgacctctttatctgctggccttggtctcccagagtgctgggattacaggcatgaaccattgcacccagccactgaaactggtttcttatttaaagttcctcactgtctttgggagacatataccctaagtgtgtgtgtggatattatgtcgaattgagtgaaggatatcagaatgcaaaagtggagagagagcaagaaggagagagagagagagagatacagagataggagaaagagagagagagaaagagagagagagaaagcaggtgtcaagtagtcaagtaaaaatagagttctttacattttttgatctgtacaagaaatgtaataactaagaatttggggcaaaatctgggaaagggaaaaagagagaaaaaaaggaggttggtaaaatagggctttaatatgtcctaataatagggctgtaatatgtcctaataagacaggcacgtgtctcatccaagcgtttttgacacagttgctctgcagtctcaatgggtcattctaggatatgtactcccttgtctccaatggatgcatcagttttctggttttctggttctggtcattggtttcaccagctgaggaatgaatattattttcacagtgcggctactcttctaatgctactcagagagtcctcacctgtgcttcctgctggtgctggaatgtgaaggtcaacattgaaagagatttcattctagaaaagcagagatcatggccttaaaaggtcaaaaggtgatatggttggaagaggttttattgtatgtttatgctataaaattccaaacaaagcaagcttttcttggcattatcctgcatactctgggcaagacttgcatatgtggttatcatcagtgaagcaccatagcaaccagtgagagagcctctgggaatatggtcacagatgataaagcgacatgagtgatgatggaaagggcattaagtaaacactatgcacgtgctacagaggtggaactttctatacaaataaatcagaaatttttccaagagccaaggtattgtgagtattaaccactttgctacctctttcttccgctttcttttgaatagttttagtatggtatatatttctccattcatttactttttaatttatatatgtctttatatttacagtgattttcttgttagaaaacactttatccgcagtttgggaggccgaggcagaagatcacgaggtcaggagattgagaccatcctggctaacatggtgaaaccccgtctctactaaaaacacacacaaaaatgagctgggcgtggtggcgggcacctgtagtcccagctactagggaggctgaggcaggagaatggcatgaacccgggaggtggagcttgcagtgagccgagattgcgccactgcactccagcctgggcaacagagcgagactctgtctaaaaaaaaaaaaaaaaagaaaaaaaagaaaacactttatccaggtcttattttttaatcctttctaatgatctctgtattttaattcatgcattaaaaatactgatgttcaaagtaatttatgatacactgatattaatataaaccaaatttgttacggttttttgtttgttgcttttgttctttatttctatttttgtctttcattctttttatgcctttggtgcttttaagtaagcattttatatacttccatgttctcttatttcttggcatatcaattctactttaaaaatatttttagtagttttcttagagttttgaaatatacatttataactaatccaaatccatttcaaataacattatatgatttcacaggtagtgcaagtatcttctaataataacacaattctgatgtcttctttctatcccgtttattattgttgtcactatatcatatattcataaaaatgtatataacatatgtataacatacacatgtgcacagatggtaaaatgctttgtttatcttattattttaaactgtaatctgttagatcaattaagaataagaaaaatgaatgcttttatttatctccatttattccttccctgatgctcttcctttctttaggtagacacagatttctgacctatataattttcattctctttgaagaacctccttaaacaattcttgcaaagcaagtctactgataacaaatgcttttaacttttatctgagtcagtctttatttctcctccacttttgaaggatactttcatagggtgcagaattctaggttggtgaatttttttctctcaacactttaaatatttcacttcattctcctctttcttgtatgggctgaagagaaattggatgtaattttaatctttactcctctataggtaaggctctcccttcagcttttataaggatttttttctttatatatatatttttaaaatttttaagttccaggatgcatgttccgggtgtgcagtttgtaacataggtcaacgtgtgtcatggtgattttccgcacctatcaacgcagcacctaggtattaagcccagcgtgcattaactatttttcctaacgctccctcactccccagcccaccccgtgacagaccccagtgtgtatttttctcctgccttgtccgtgtgttctcattgtatatttgattttctgtagtttgaaaataatatgcctacgtgtactttttctggcatttatcatactcggagtggtctgagcttctaggatctgagatttaatttctgatatcaatttggagaaattctcggtaattattgtttcaattttttcatttgtctttcttctcttgctggtatttccatgacacctatgttaacattttgtagttgtcccagttggatattctcttctgcttgtttccctccactcttttttctctttgcttttcaattttgcaggatcctatgatatatcctcaagctcagagattcttccctcagccatgtccagtctactagtaagcccatgaaaagtattcttcgtttcatcttcctcctacccctctccctcccctccccttcctcctccacgtcctcctctctttcttctccttctccctttcttctcctcctcctccttttcttctgattattttttaaaatagggacagagtctcactctatcacccagcctggactacagtggtgcaatcacagctcactgcagccttgaatttctgggctcgagcgatccactggccttagcctcccaagttgttgggattgcaggtgtgcaccaccgcatctgaacaatttttttttttttggtacagatggggtcctgatattttgacccagttggtctcaaactcctggacttaagcaatcctcccacctcaatctccccaggcactgagatgacaggtgtgggccaccagtccattccttatttctgttacaatcgatttgacttttagcatttcttttgtctctttcctagaattatcatctcagctgacattgcttatctgtgtttccttgctgtctattttgtctactagaacccttggcacattaatcatagttgttttaaattcccagtctgattattttgacatgcccaccttatctgggtctgtttgtgatgccttctctctctcttcaaacagtcttttagtatgccttgtaatttttttcttgatacccagacatgaagtacttgggtaaaagaactgttttaaataagcctttagcaatatggcagtaaggtatggggaggggaatcattctatagacctatgcttagatatcagcccccatcagcagatgtgctaatcaggatcccctgacaccacctcccttaggtggaacaggatgactagagctggcaagagttgggtattttctttttccagtgaaactgtaataaaactccagtaggttaggttctggttcaattgtttctcctcatttggagtctttcattgttctctcctgcctgattgctctggctaggtcttctagtactatgttcaatagcagtggtgagagtgggcatccttgtgtggttccacttcttaaagggaatgcttctagcttttgcccattcagtatgatgttggctgtgggtttgtcgtagatggttactattttgaagtatgttccttcaatgccaaatttgttgagggtttatgacatgaagggatgttgaattttattgaaagcccgttctgtgcctattgagatgtggtttttgttttaaattctgtttatcaactcatcatctaggttttaagccccacatgcattaggtatttgtccttatgctctccctcaccctttcccccacccaccaacaggccctggtgtgtgatgttcccctccctgtgtcaagccaccatggcacatgtatacctatgtaacaaatgtgcacgttcagcacatgtatcccagaacttaaagtaagaaaaaaagttctcatctttcttttcttatataaaagatagatacaatgatactggtgagaattaaataaatttatacatgtaaaacacctcacctagaacataacacccaaacacaggctacataaattaatgtttgtccataaaaaatgcataaaaaattccgtttatgtgctgaatcacatgtactgatttgcatatgttgaaaagaatgaagtcatgtcctttgcagcaacatggaggcagctggaggccatcgtcctaagcaaactaatgcgggaacagaaaaaccaaatgctacatgatcttactggtaagtgggagttaggcactgactacacatggacacaaagatagcaacaacacacactagaaactattcggtgggggagggagggagaggggcgtgggtggaaaaactacctatcagctactacgcttactacctgtgtgatggcaccatttgtacaccaaacgtcagcaacatgcaatttacccatgtaacaagcctgcacatgcacctcctgaatctaaaataaaagttgaaaagaggaaaattgttcctcctgagggtagatcttcataggaagaacagaatactctggcgtatttcaaaatgggtcattgttcctcctcccctaacagaagtatgaggggtcttttctcctgcttttacaatgaggacttgacagacctcttagaggtaaaaccaacaaaagtgtgggaaccccctccaataactgggtccccaggagttttgacctctcagatttgtctataccaagccttcagtaattcttcaattacagtaaacatttcccttctctgatattggttcctccagaggttgcaatggatggatttcttttacaataagttgtgattccctctacttgcctgttggtctttccaatttggggagctgcagtttgccctgtgacatcttttaccaatcaagactgctgagttttcagtttattcagctttttacttattgtcgggatccagcagcaactttcagcttcttacatgccagatcagaaactggaagtcaaatataagttcattttttatataactaccatatcaacttaagttttgtttataacttactaaaaagaacaagtgccttagtttgtcctgacatccaataaatgctctaatatcgggattacttaaagagcatttttctaatcagaatgcaaacaagaactacatgttaattcagttatgtcttttagggacttttattctataatcctcattctccttcaatttttgacatttgtttttgagatagtctagattattattttcttatagaaagtcatacaagctatattagcacgttgtttcatgacagcgtcatttcacacgttcgcagtagaatttaagagtggaaggagaagacagagatgctaacaagagaacttggacttatctctttctggagagaagtcagggaattgtcatgagatcacaaatcaagacagatgggctgggtgtggtagctcatgcctctagtcctagcatttcaggagtccaaggagggaggatcatttgagaccaggagttcaagactagcctttgcaatatagcaagatctcatctgtacaaaaattttttgaaaatttaattggaggtaatgaattccccttcacccccactatgaacatacccttacccctagagttttctgatttactctttggcccattgagcatgaattttctgatactgcatccccttccgataagggagaagaaattattactcccacctctcctctcctcctcctgcctggactctgtattctgggttaaactatgatttattttaaggatttataacgcctgacacatgtagctgagccttctgcacagagaaatattgggagtggaggctaattgggtcaaaggaaagagccttaaacctacactacagcctatcagggtgaatcagaggtctacattgccctactcttgtctcacctactgccacaatctaggtgaaggtttggaccatagaacgaggaacttgtgtggagacttttagccccatagatgccctcagaccagtctgcaggacactctgccctgacctgccccagctttgcacacatattctccagtccttgaaaggaaactgcccccttcaaagcttacaagtttctcctcctggctcagcacggggagcaagttctctagatagcttcttgttaaataaaatggtagggaagaaaacccaggcagctgagcatagaaggggatgagcaacaagcttcctctccaaacatgattttccgtccaaggtcatgagcactccctggtctgcttacatttaccttatgctagatttctggtcagcacaacagcatgcaaagcttcagcagcttccttctagatggagctgtggtggttcctgtttaggcagttgtgctcgagaatcttctcctccaggactactgggcaaggtccagtgcaaaggagttccccaacacttttatctactttcatttgaatttttaaattaaacattgaactcagcacaaagagaggcgaggatcatgattattgggtagattctacttccaaatattgtaattgcaattccttgtgtaattattatagcactagggctaccagagctttaaaatctgttctcaagattctgaaggtagtaagtggtttggctggcatttgacatatattttcaatgagtttaaaattagttttcttgcctgtataccactctgcctgactaaccttaaaataatctctttaaaatatctgtgatatttacctaactacatttttataatgtcattcaatactatacttattgcataaatattttacgtacttatcatgtaagtatacaaaatagcacatatagatcttatgtttctccatgaagtttttaattgtatcagctacataattttttaaatttttttattttaagttctgggatacatgtgcaggatgtgcaggtttgttacataggtatacatgtgccatggtgatttgctgcacctatcaatccatcatctaggttttaagccctgcatgcattaggtatttatcctaatgctctccttccccttccccaccaccccccggcaggccctcgtgtgtgatgttcccctccctgtatccatgtgttctcattgttcaactcccacttatgagtgagaacatgcggtgtttggttttctgttcctgtgttagtttgtatcaggtacataatgtttaatcatagttatatactatcattcattcacctttgatctacccaaaactatgagaaggggaaagaaaagaatgaaaggaaagtgcgatcaatctgaataggcctgtatcgattagagcaattgaattaataattaatatcatttaaaaacagaaagcctcagacccagactggttcactgatgatttctaccaaatatttaaggaagaaattcttaccaattttctgctttatcttttaaaagacagaagcaggggaaatatttcctaactcattttatgagaccatcattaccctaatagcaaacctagacaaagacattaccagcaaaaaaaaaaaaaaaaaaaagaaaagagaagaagaaaataaaagaaaaaaattaggaagaaagggagaggtaaaactatacagattaaaatctaccttggacatacatgcaaaattcccagcaaaatattagcaaattgaatccaacaatatataaaaataattatacattataaccaaatgggattcattgcaggtatgcaaggctggttcaatatttgaaaatcaaataatgtaaaccatcacattagcaagctaaagaagaaaaatcacatgattatatcaatagatgcaaaaaagcatgtgacgaaatcccacacccattcataattaaaaattatcagtaaggtggaagtggagagaatgccttcaacttagtaaagaatatcttcaaaaacctacagatagcatcatacttaatggaaagaaacgacaagctttcccactaaggttagaaaccagactagaatttcccctcttgtcactacttttcaatattgcactggaagtactaaatgcaataagacaagagaaagaaataaaaaatacttggattgggcaggaagagataaaactgtttttgtttgcaaatgggatgatggtctatgtaaaaaatctaaaagaaccaacaaaaaccctcctggaactaataagacattatagcaagtttgaaggatacaatgttagtatataaaagtcaaacactacatagcagcagtaaacgtgaaattggaaattaaaaatgcaatactattgacattagtatccccataaaatgcttacatataaattttaaaaatgtacaagatttatatgtggaaaatcgcaaatttctaatgaaagaaatcaaagaattgaatgtagacatattccatgttcctgggtagaaaaactcagtatctattttttatatcgtttttctcttttttattgatacataataattgtacgtatctgtgggttacatgtgatatggtgatataaatatacaaagtgtaatggttgaatctgggtaatgggatatccttcccctcaaacatctgttatttctttatgttgggaatatttcattattgtcttctatctattttgaaatatacagtaagttattgttaaccatagtcaccctactgcactattgaacacagaactgatttcttctatctaactgtatttttgcaatcattaaccaactgatcttcattcaacttcaacctttccaagcctctggtaaccattattctactctttatctcttgagatcaacttttttggttcccacatgagtgagaacatgtcatacttgtttttctgtgcctggcttatttcactttacataattatgtgcatttctatccattttgctgcaaaggagaggatttcattctttgtaatggctatagactattctgctgtgtatttgtacattttctttgtccattcatctcttgatggacacttagactgattccatatcttggctattgtgaatagttttgctgtaaatgtgggtggggaggtggaaatatctctttgatatattgatttccattctttttaatatataccaagcaatgggattgttgaatcatattgtagatgcatttttagggttttttttttttttttgaggaacctccatactgttctgcatagcgattgtactaatttacactcccactggcaggatatgagtgttcccttctttctgcttctctgacagcatccattattttttctatttttaaatacatttttttatttcaatggcttttggggtaaaagtggattttggttacaaggatgaattctacagcgatgaagtctgagattttagtgcacccatcacctgtatagcatacactgcatccaatatatagttttttgtccttcaccaccattcccctcttctgagtctccaatgcctgttataccactgtgtatacctttgcatacctatagtttagctctcacttataagtgaggtcatacagtattgggttttccatttctgagttacttcacttagaataatgacctccagctccattcaagtttcattcttttttatgtttgagtagtattctgtgggagtatctataccacatttcctttatccactcatcaattaatgagcacttaggatggttccacatctttgcaattgtgaattgtgttataataaacatgtgcatgtgtctttttggtatagtgacttcttttcctctgggtagatacccagtagtgggattgctgaatcaaatggtagatccaccttcagtttttaaagaaatcgccatactgctttccatagaggttgtaatttacagtcccaccagcagagtaggagcattcgcttttcgtgacatccacaccaacatctattgttttctggctttttaattatgcccattctggcgggggtaaggtggtattttattgtggttttaatttgcatttcactgatgattaatggtattgaatattttttcatgtgtttgttgccatttgtataccttcttttcagtaatgtctattcatgtcctttgcccccttttggatgggatatttttttcttgctgatttgtttgagttccttgtagactctggatattagtccttcatcagatgcatggtttgcaaatatattctctcccattctgtgagttttctgtttaccctgctgattatttcttctgctgtgtagcagctttttagtttaattaggacctatttatttatttttggttttgttgcatttgcctttggaatggtagtcataaattatttgcctaggccaaagtccagaagtgttttcctaggtcttcttctagaatttttatggtttcaggccttataattgtctttgatccattttcagttgattattttacatggttagagaaatgaatccagtttcatttttctacgtgtggttatccagttttcccagcacgatttattgaatagggtatcctttccccagtttaggtttttgtatgctttgtcaaagatcgggtggttctaagtatatggctttatttctggagtctcctttttgttccgttggtctgtatatccacttttataccggtaccatactgttttggttactatagccttgcaatataatgtaaagtcaggtaatatgatgccttcaggtttgttctttttctcaggacttttttggttgtttgggctctttttttcttctgtataaattttaggattgctttttctagttctgtgaaaaataatgatggcattttgatgggcattggattgatctatagatggctttggacagtgtggtcattttcacaatattgattcttccaatccatgagtgtggaatctatttccatttgtttgtgtcatctgtgatgttctccagcagtattttgtagtactctgcttctagagctctttcaccttcttggttaagtatatttctcaacattttattttttgcagctactataaaagggattatgtcattgatttgattatcagtttggtttttgttggtgtatcccagtgctactgatttgtgtacattgattttgtaacctgagattttgctaaaataacttatcaaatctaggagtcttttggtggagttcttagagttttctaggtatacgatcatatcatcagcaaacagtgatagtttgactttctattttataatttggatgttctttatttctttctcttgcctgattgctgtagctgggacttccagtactatgtttttgtttttctggtggttgtttgtttgtttagacagagtctcgctctgtcacccaggctggagtgcagtggtgcaatcttggctcactgcaacctccacctgccatgttcaagcctcagcctcctgagcagctcggactacaggagcacaccaccaagtccggctaatttttgtattttcagtagagatgagctttcaccatgttggccgggctgatctcgaactcctgacctcgagtgatctgcctgcctcagcctcccaaagtgctggaattacaggtgtgagccactgcgcctggcccccagtactttgtcaaatggaagtggtgaaagtgggcatccttgtttcagttcttaggaggaatgctttcaagtttaccccattcaggatggtgttgtctgtgggtttgtcacataaggcttttattattttgaggtatactccttctatgcctagtttgttgaagatttttatcataaagggatgctggattttatagaatgctttttctgtgtctgttgagatgattatatggtttttgcttttaattctgtttatgtggttaatgacatttattgacttgcatatgttgaacatccctgcatttcagggatgaaacccacgtgacaatggtatataatccttctgatgtgctgttggatttggttagctaatattttgttgaggatctttgcatctatgttcattaaggatattggtctgtagttttcttattttgttatgtcctttcctggttttgttatcagagtgacactgaattaataaaataagttagaaaatattccctctttattaatcttttggactagtttcagtaggattggtactaattcttttttgagtgtctggtagaatttgactgtgaattcatctggctttggggtttttagttgtttttggcaattcgttagttactgactcaatctcacggcttgttattggtttgtttgggatttctatttcttcctatttcaagctaggggagttttgtttccaggaatttacccatttcctctaacttttctagtttgtatgcatagaggagttcatattagttttgagtaatcttatatttctgtggtgtcagttgcaatgcctccatttttatttctaatcaagctaatttgaatcttctctcttcttttcttggttaatctagctaatgatctatcaattttatttatcttttcaaagaacaaactttttgtttcactaatcttttgtgtattttaattcaatttcatttagttctgctctgctttttgccatttcttttcttctgctagctttgggtttggtttgttcttgtttctctagtttcttcaggtgtgacctttaattgccaacttctgatctttcagactttttgatataggcatttagcatgataacccttcctcttagcactgttttgcagtatcccagaggtttggataacctgtgtcactattatcactcatttcaaagaatttttaaaattttcatcttgatttcattgttaactcaaacatcattcaggagcagattgtttaattttcgtgtatttgtatagctttgagagttccttgtggagttgatttctagtttcatttcactgtagtctgagaagatacttgatatgacttggatttttaaaaacttattgtggtttatcatatggtctatcttggagaatattccatgtgttgatgaaaaaatgtatattctgcagttcttgcatagaatattctgtgaatatctgttaagtcctttgttatggagtgcagtttaagtccagtgtttctttgctaactttctgccttgatgatctgtccatgagtgttaaaatcccccagtattattgtgctgctgtttatctcttttcgtagttccagtagtaattgttatatgaatctgggagttccatagtcaggtgcatatatatttagggttgtaatatctcctctttgaagatcaatcttgttgattcatcattttatcattatatagggtccttatttgtctttttttacattgttgctttaaagtctgttttatctgatataagaacaattactcttgcttgcttttggtttctatttgagtggaatatctttttcaatcccctttaccatgagtctttaagaatatttacatgttaggtaagtctcttgaagacagcagatgttcggtttgtaattttttttatccattctgaccatctatatattttaactggagtatttagatgatttacattcaacattaatactgagatgtgaggtactgttccagtcatcatgttgttacttggacactttgttttctttgttgcattattattttacaggccctgtgagtttcatgttttcaggaggttccattctggtgcacatcaaccttttgttgcaagatttagaaattgttttagcatctcttgtagggctggtctgttagagacaaattctcttagcattttctcatcagaaaaatactttatttctccttcatttttgaaacttagttttgttggatacaaaattcctggctgacagtttttttctgtaaaaggtggctaaagataggacctcaatccctttggcttgtaaggtttctgctgagaagtctgctgttagtctgataggttttcctttataggttaccggatgcttttgtctcactgcccttagcatttttttccttcatgttgactttagataccctgatgactatgtgccttggccatgtcctttttgcaaagaatttcccaggagttctttgagcttcttatatttagatgtctaaatctctagtgaggtcaggaaagttttcctcaattattccctcaaataagttttccaaatttttggctttctcttctccctcaggaacatcaatgattcttatacttggccattgtacataatcttatatttcttggataccctgtcgatttcttatagttcttttttctttatttttgtccagttgggttagctcaaaagccttgtctttaagctctgaaattctttcttctaattggtctagactactttaaaactttccactgcattttgtaagtctctaaatgtgtctttcatttccggaagttctgtttgatttttctttaacacatctctctctttagaaaatttttatttatatcttgaactaatttttaaatttctttatgttgattttcacttctctcttgtatcttcctgaataacttaataattagccttttgatttccttatctggtatttcaaagatttcaccttggtttggatctattgctggagagctaatggatgttatagaaccctgttttgtcatattgacagaattatttttctgatttcctctaatctggttaaactatttcttctaattatttttgaatttattttttattcaactgtgatttttcttatttcctttttctccttgaggatgtgactttaatgtttatagtttattttaacctatggctctgggtgctttcaggggtccaatgatgtgatctatcctcaagactcccagcagtgggtaacagcaccagctctgatgggggtggcagaggggtgacgtagattctgtgatattgtttggttataaataggcttaatttggctttctcaaatgccagttgtagtagtaatgaactggtcatgtggacagactgagaacctcctgattaaccaagttgatgcaggcaatggtgataaccgaggtcacacacaagttttctccttcctggttgctgttatgtgcctgcagaggttataatggactctgtcaattggcctacagccaggatgtgaagcttgcaaaagagcactagctgcagtggtagcagtgggatttgtgcttgtcttttgtaatctcgtttgtctatttcacctttgttgtctgtgctgttgagttcttatcaaaaaagttcttgcccatatcaatggcctgaagaatttccccaatgttttcttcaagtaattcatagcttcaggtcttgcatttaagtctttaatccattttgatttgatttttgaatacaataagagataagagttcagtttcattattctgcatatggacatccagttttctcaccaccatttactgaagagattgtcttttccccattgaatattcttggcaccactgatctttgacaaaggtacaaagaaaatgcaatggtcctgtacaagaaaatataatgtatttggagatcagaatcaaggacaaggcgactgagtgtaacaagggagggatatcggctggagagatttgacaagtcagcagggtgcagagatgcagaattccttaagctatgaacagaggtcagctttactagtgggacattattttaagacattaactgaggattctctccttctcctaccaccctgccacattttaggtgcttttaccactcttggaaaaaattgtctcctaaatgtacagtcctctaaaaatgaagagattattcaagaagcacagatattggaatttttgcctatgagttccaaaacagtatttaaagtcatggtagaaaaaaactatcttgaaaggcaacatgctttattaaccagactttctcagagagcaggtaataatggccgtatttattgagcattcaatgtgcaccaggcacagttctgagtctctcatattttgtcctcaggaaaaccctgacaaaggtagcattgttgtccccattatatgcttgagaaaactgaagaaaagagaggagaattaacttgcccaagccacacagcaaagctgagacttgagcccaagtagtctggttccagatgtcatgcctttgggatggtgttttgcttccagtcatctggctttggatctcaagggtcaaacaggatggccctgactgcaccccaccccaacatgggcaggtgatgggaatgaaggaggaacctagaggtgaaagggtggggatgtgctgaacccctgacatgtgtgagggtgcctggcacatagcagaggagagtagggggaggattcaggtagtatctgttggccaggctgcctgggcagagtcagagggttcaaaagaggaaaaaaaatggagctgtctgaaggtaggggaagggggttcacaaaagcgatcaacttgaagggggagacgtagggtgggatgctggcaagaaagggagctaagaattcctaaaagcctaccaggatagaagctgcacccttctatccctgtgttctgagctggctaaggacctcggtcttgggacactcccaaagcatggaggccctatgatcagccaaagaggcagtcaggttcttgggttcagtgacaacaccccacctaacccgcccaggttatgccccttccctgacgcctcccagtcctcaagagccccctgctggctgtcagtagaggcccaggcacagttttattccggagaatctggaaaggcaggtggatgggtcagagggtcactgcaagcccgcgttcaggggctccactcgcagccaaagtcctccttcagcgcgcatgatcagctccggcttcctgcggggctccgtgtggtccagcaggaagcggaagcgcagcagcgtcagcgccaggaccaccttcatcttcgccatggcgaacgcctgcccgatgcagttcctgcgggtgggagtggggactgtgactgcgcccaggatccgcatttgggccccatcacgccggaaacctggcccgggatcctcaaccgcacccagatcagcctgagagatagagaggggctgagcatgcgtgggacccccctgtgggtttgcatgtcccccagagcctgggccagactccagctcccagctcagaccagcagatggaggaggggattctgagcactctgcggaccctctaggacctactcacccccattctatggacattttcccataaactgtgaaggaatggagggaaagagaactggaactgggaccatctgcaaacttccccctttttcgaccctcgcacctatcaccccatccccataccagacacaggtggcccttacctgggtcccgcagagaagggaataaaagccagaggtgacctctccttgctgttctctgagttgaagcggaaggggttgtagacctggaggtaagaccaagagggctgctgggtggggtctcccaggtccagcagccttggaaagacagttgtgtgtgtgttggggcgaggtgatgttggattttcctgatcaaaaccctgcctcctcctctaggaaccttggaattgacaaagagggcagggggtcgggggtggatgggaaaggcagcacctcaggatccggtcacacagttgggttgtgatggattcctataatgttgatgatgcagataatgcctgtgggagagaaggtggcagtcaggacaaggatccccctgaaggacccctcttcctacccggggggctcctccccatgaggctgtgagcatctttggggatgaccctaccatctgggagcacaatgtcccagatgcggtggcgggaggtgtacggaacagggggatgcaaccgcaggctctccttcacgcacatggtcaggaagggcagctgggccaggtcgtacctaaggcaacaccccagccccaatcattatcaagggagcaaagacacacttctccagcttctctatttccaagtgagaccttttctccctgtaacaaaataaactccacatggatcaaaagtttgagaattagaaaaacagaaaaaattagaaaaacagagaattagaagtaccagagaaaatttagccaagtagttaaaaatatatactctgaggaaaacacacccagaagccagctgaaaaaagttaacaaatttgcataaaaataaatattgtctatggcaagaaagcaaactcaaatgcaaatgaataagaaacaaaatacccagatccaatgttttgctcttatttcgcatggaactagagataccagcaagtgcaattaggcaagggaaaaacaagagagtcatgcaatttgaaatgtgggagtaaatgtatcattttggcagatagtgatgttatacttagaaaacacaggaagctccactggaaaacgtttataaacgtttaagatccagtaaaggagctgaattatctgcttaatctttcttcttttgccttggctatttaaaattttaataccatctaaacctatctgattcagaatttgaaaactgtaaaatataatccactcctatggcccaatgccatctacttctccccacatgttgcccaggttattatttttttaatgtgtccttcctgtgctaatatttagtatattaaaaaaattatataggagcacaccatctactatacactagtattctgcatcttttttttttttgagacagaatcttactctgttgcccaggctggagtgcagtggtgcaatctccgctcactgtaatctccacctcccaggttcaggtgattctcctgcctcaatctcctgagtagttggggcttcaggcctgcaccaccatgcctggctaatttttttgatttttagtagagatgggattccaccacgttggccaggctggtcttgaacccctgacctcagatgatctgcccaccacagcccacctcagccttccgaagttctgggattatagccatgacccaccgtgcctggcctatatctttttctcatttaacagtttatcactttttcttagcccctggaacttacgtcaaaataaggttatccctactctggagctatgaaataattttctcatggtttcatctagggcttttaagactcttttaaaaaaattttattaatctggacattatcttgtcataagacatgagaaccagcttgttgccttttttccagaaggctttccagttgtcccaagagcttttacttattttttctcttgatacacagcatcatctttagcatgtactgtgttcattgggcacagaatttatatgtataaatcattagtttttcatgtagaaataaccaccaactgaaaagatgataataaaagatgctagtcataataatataaaatacctggattaaacttaaaaagaaacatgaaatctctgtattttattataaatttctctcaatccaaataaaagatacactttaccatggcaacaaatgtatgtaaggggtgatttaaaaaaaagtcactctaccagctattaaaacctattaagaagttgcagtaatagcaatagtctggcaatgctgtaagaacagaaaaacagacctattcaaaagactagaaagctcagagacagacaagtgaataaatgaaaacttcccatctgctgaaggaagctctacgaaactctgggaaatagatgggtactatggctgcaaaagaaaatgtagacgaacgaaactctgggaaatagatgggtactatggctgcaaaagaaaatgtagacgaatttgacttcataaaaattaaccaaaagtaccctcaaacaagtcaaaaggcaatcttttgcaacaaaagacagaaaaaaagattattgtaatacacatccttttaagtaagtatgaaaaaacaacccgaagaaaaacagcaaaaaaaagaaaaaaaatgtaagatgaccaatcccatagaaagaaaacaaatggcgtatcaacttgggcaaaagatgttcttctccctcttatttaagaaaatgttcattaaaagatgaaatattaaaattgacaaaaacttaaaatttaataatacagtaatgctattggtgaatttatggggaagtttaagcttatgccatcaaactcagctaatataggaatggatttgcactcatttttacaattgtagaatgcaaatggtctttgattcagcaattccacctttgggagtgtgtcctacagagatgcccacacatataaacagtggtcactgtacacacatgccaattgcaacaggtttaatttagcaaaaggctaaaatgagccaaatatacatggataggaagatatttagataaacatccacacaatggaatagtatacagctacacaaaaggaggaaataaggatcactagtcctgtcacacaatgcaggctagaaggtgaatcagtacagagactctgaaaggcagattgacaattccacaataattgaaaatgtttacacaagtgacttcaagaaagggacaggccaaataaagtatggaatgctattcagcagtcaaaaaaatagctatcagacacactgttgagtggaaaaaaaagtgttccaaaatgtctatatatatatctcatagtgcaaaatatatatggaatatataaggagatagatgatagaaagttatgtagatagatggataaacaaacagacagacagatgacaaatcagtatctctacaggcccctttggagaaagggaggatattaggtggggtagcaggaatgtcaaggataacccttgtcttatctgtaatgtctcattgagtgcaagaagaacctgttcttttgtaattcaaactcatttttttgtaattctcattataaactcattttccatgtggtatatatacaaaatggagtgctattcagccttaaaacagaagaaaattatttcatttgtgatagcatggaagaacctggaggacattatgctaagtgaaataagccaggcacaagaagacaaatagcacgcgaccttaattacctgtgagatctgaaatagttaacatagaaatcagagaaactgagaagagaatggtggttaccagaggagggaggaagaaagagtggaaagacggtcaaagggtacaagtttctgttagacaggaggaataagttttgagacctattacatgcatggtgactacagttaataataatatatttttcaaaattcctaagagagtaaatttcaaatgttctcaccataaatatgatgagtatatgaaatggtggttatgtttatcagattgacttaatcattccacattgtatacatatattataacgtcacattgtaccccataaatatatataatattaataaacataataaataaaaataaacttattttccaaaactcatattttgagaaaaagaaaagaaaagaaaacatcttgctgggtacagtggctcacgcttataatcccagcactttaggacaccgaggcaggtggatcacaaggtcaggagttcgagaccagcctggccaacacagtgaaaccccgcctctactaaaaatacaaaaattagctagacatggcggcgggtgcctgtaataccagctactcaggaggctgaggcaggagaattgcttgaacctgggaggtggaggttgcagtgagccgagatcgcgccattgcactcactctagcctgggcgacagagcaaaactgtctcaaaaaattaaaaaaaaaaaaaggaaagatctcaaaagatatagtgttaatgtgcagatctgtgacactttatttctttttatttcaacagcatttggggtacaagtggtttggttacatggatgaattctacagcggtgaattctgaggttttagtgcacccatcacctgagcagtgtatactattcccaatatgttgtcttttctcccttatccacctcccaacctcgctccctaagtctccaaagctgattatatcattctgtatgtatttgtgtcctcacaacttagctcccacttagaggtgaaaacatacagtgtttggttttccattcctgagttacttcacttagaataatggcctccagctccatccaagttgcagcaaaagacattatttcattcctttttacggacgagtagtattccatggtatatatatatatgtcacattttctttatccactcgttggtcgatggacacttaggttggttccatatctttacaattgtgaattgtgctactataagcatacatgtgcccgtatctttttcatataatgacttattttcctttgggtggatacttagtagttggattactggatggaatggtagatctacttttagttctctaaggaatctccttactgttttccatagaggttgtgctaatttacattcccaccagcagtgtaaaagtgttcccttttcaccacacgcacaccaacatctattgttttttgactttttaattatggccattcttgtagaaataaggtggtatctcattgtggttttttcatttgcatatccctgatgattagtgatgttgagcattttttatatgtttcttggctatttgtgtatcttcttttgagaattgtctattcatgtcctctgcccactttttgatggaattatttgtcttattctggctgatttaagtttcttgtagattctggatactagtcctttgtcagatgcacagtttgcaaatactttcttccactctgtaagttatctgtttactctgatgattgtttcttttgctgtgcagaagctttttaattcagttaggtcccactgatttgtttctgtttttgttgcatttacttttggggtcttagttatgaatcctttgcctaggccaatgtccagaagagtttttccaaggttatcttctagaatttttatggtttcaggttttagatttaagtctttgatccatcctgagttgatttttgtataaggtgagagatggggatccagtttaatttttctacatgtggctatccagttttcccagcatgacttattgaatagggtgtccctttcccaatttatgtttttgtatgctttgtgaaagatctgttggctgtaagtatttggctttatttctgggtcctctattctgttccgttggtctaagtacctacttttataccagtgccatgttgttttggtaactatagccttgtagtataatttgaagtccagtaatgtgatgcctccagatttattctttttgtttgttattgctttggctgcacaggctcttttttggttccatatgaattttagaattgtttatccagttctgtgaaaatgatgatggtggtttaatgggcattgcattaaaatatgtaggttgctttgcatggtatggtcattttcacaatattgattcttccaattcatgagcataggatgtgtttccatttgtttgtgtcatctacgatttctttcaacagtgttttgtagtactccttgtagagatctttcaccaccttagttaaatatattcctaggtattttatctttggaactatttttttggcagctgtgtgagtcagagggcagttcttaggtcactggggtaatgttccagaggtgagtataactgcctctgccttgcaaaagagcttgcaaagggagtggagagtagcaggtggcagtaagcctcatccggctcccatgcagttggcaagactgatctcactcctgcagtgctccacccatagcactggatttagatccaagtagtctatgcacagaactcagacctgccccaggccataagcttttcccccagagatagcaatacttttaggccatgcccctttttgtccctgtccaaggccaggcacccagctcctgcactcctgtctgcagtacacttcccgcttgccccctgggttctggtcaagggagttcatccccacttgaggttatatcaagaaattcagttgggcatttcaacctgtgacccctgcctgagctagttggctggcttctgcaaggtctcctgtgagatataataaggaatggcttccctcagtccatgctggagattgggaatgcctgcaaggcactttctgctgctgcttctatttttatatttcttaccactccctaaatcagttccagctctgggtagagttaaggcctccccctgtggtctggcttttcagactccccagtgaagatgtgtaccctggaggcagtctctccccctctcacactctggggattcacagtttttcacctgtctcacagagtaggatgcagcctgcagcttcttttgaagggtctatggattcttttgggtttcctgttaagcctctgtgttgttttttggggaaagaaagttcacagtgtgaatctctacatacttttttgtccttccacaggggagagacacactgacattgcctccaattcatcatcttggaaaagaaatgttgtgtctattttatatactcctatttgtatagaaaaagtctgtgttcatataaagtgggcatcaagataaccattttactggaaggacacacagaaaaccattgatggtagaaaccgctagtgtgagacttaagaaggaagctcattttttatcataaatttatggattttttttgacagagtgcacaattttgcttgaaagctaggtttttaaaagcatagaaatgtgttgccacttcacaggactgctgggctgagcaaagtcttggacgggaggacactgccttcaaaacacctgtccagtccattgcctcctctccatccccagcccctggcctggctcaggtcccagaatgtcctcactgggacttcattctacagctgatcctctctaatatgctctccacagtagtcctgaaaggatcttccttctgcccagatctggcctacccctcccctgctcacccacttcctatggctcctaattgcctttgggttaaaatggaagtcattaacattttttccatgtcttccacagccaggctctgctgccacctccattattattatctcatcatgactcagtttctccctctctcattctctgtctcgttttctcttccctcctctctttatctctctctgtccctcactttccctccctcttccttctttctccctttataaccttctccttcccccttacacaaacaactccttctctttttccctcttctccctctctcccacccctgcttctttctgcatctttgccaaggctgtctttttgacttagaccactactgcatgcaaacgtctactgatcatcattcaggatctcagttagaatacttttatttatttatttttactgttttagagatggattctttctgtattgcccaggctcatcttaaacctgacctcaagtgatcctcccacctcaacctccttagtacttggtatcatgggcgccagccaccacatctggcgtgaaacacttactatattctcagtctgcttctcttgttctcaataccatccttgtccatgtggacagagaagtcctacctgagactcttcccactaggctgggagtacctgaaagacacatccctggacagtgttctttccaggtatccagggaacagaaaggtgctgggaacagaactggcattggtaagacatgtggaagagtttgctgaatgaagactgaatggatgaatgatgcaggtattctagaaagagatagatgacttttacccccaggtctcctttacaactccctggactggactggagggtaggaattagggaacagaagagcaaacatccaggaagtgaagatgtttgaaaaaaatgataattcagagaaaataagaagtgagtgaagggaaaattcattgactgaacatgtctaggtgtcatcatctgccttcacatattgtcaccagctctctcagcaggctaggactctctgtcctaaaagcctgaaaactttcccctgctagccaggctggatatcaagttctgcctctgggctctgctcctaatactactaagcaataatggaagaattgacaaaaacaactttctcccttcccacttggggagcagagccaatgacgggctcaggaacaggccagaagaacctgcactcaccattcaatctctttaggatcgcggtccttcagaagctcttgcacctcctgccggcagtgctcctggtattctgggtgcctcgcgaggttgtacaggacccaggagagaccactggctgtggtgtcatggcctgaaggggaagcaggcaggcttgggtctctgggctgcttcagcaccagagggtggacagcgtccatgcattgaggccctcagggaggatggagggagggggaagataggcagaattgagtgatccagggcccacccaccatgttcctgagatgaaaggacccctgtcctcactgtagtcccacactggcagcctcacctgcaaacatgaaggtgtcagcctctgctcttacatcctcatctgacaacaccttcccatcttcatcctgaagggaaagcaagacaaaccctcccccaaatttactatctctgagactcccgagtctcacctgagacaatctctgaaggtccgatcttcttccagaaactcaaacccactctgaatgtctagatctctcttgttcaccatcaccagagcccccattccaaggtcttccccccagctcctttgccttgtctttggtccctggtgggaggaatcaatgactcgaatattttcatatttctgtataatgaagactttaagagaaaaagatactggcaacttggggtacaggaagtttaaatggcaatttgccttggaggttaaaaattacatattgctttaaagatatttgctcacattctagagtggtaaactcagagaatcttatctttccagaagatatttggattataaacctatagaaattgccatctcactggagagtagtagtttatactcctgaacaaagcattctctctctctctctctctttcaccctgtaaaaaagaaggagcatatgaactaactgtcctatataagatataagactcataatgtgggggcccctctcctatggtgcaaattcttgtacatttacaggtaaaaacattgtgttgccctagaaatggggagccagcacaacaatcctactcctcccactgttactgctgtaaataattaatgggctgctgtaatccaggggtttggtgcatctgtcatcatagatatagacatagacgaagacatagacataaataaaaatgtgaaagactaacttactaacttgtaagttgagtaaaatcgcacgttcttcacagtttcagaattagcagtcccctgcgggctgcattcaacagaatcatctctaaaacctatctgtgaccttccctttctcaagcatcttccatggctcccagtgccctctggatgaagtccaatttatttcatctgacatttgacataaagctccattctatcactgtaattcagatcgtagagaaacccaccttgctcagcagaagcacatcaatgaaatccaaagtctaggacttggctttgttcttgaggaaatcacaataccctgagtgggaagggtatggcgccgctcctggatgacggcatctgtgaagtcgtgcaccaggcggcaggccctgcggaagcgccacccgtcatgggagaggtaatacagaaagtccatgtgctggaggatatgctggtttcttttttctacaagggcactgagctccaagatggtagcaatatattcactgggcctcctgcaggccaagggcagaaagggaggcaacaatgtaacatatgcaaagcccaggaacacctcccaccagcagccaggagctacctcccatcaggaaactgagtatctagaaacagatggtcctagagatacatgatgggtatctgtcctgagattgactctctagactctattccctccctgcatcctatctctgagagctgtctccatgcacctaggtacccggagtgtagcttggacaccatgtttctctcatctcccatccagtatccagtactgatcatattccttaccaaaactgtccacacaactcagacttcatcctcttccacttcagcccgactccagcccccaccataaccaatttgtacccaatgtcagctccatgtagtgtctacactactgtcagattcccacacagctcagctcttaccacagccatcatcagctgaaactccttcaaaagctccctgggaccatcttgataaacttcataccacttttcctgattttcagtgtccctaatatctaatcctatttccacaaccacatttctactgtctgttgcatatgcttggctcatcctaaccttattactgttactcaaatatttctacctacctggaaagacaacactttctccccttccttgaccttaaaagcccagctatgatacaaatcctcccgaaaggtacttctggttactttgctcattcctccctccccaactttctccctttggtccatggattcacatcccaggccctgggaaggaactcactcctgacaatggctgtcaaagctgaagatgcatttctgcagactgtccaaggtcatgaggctgatgtgctcaaacatgtccagacgactgctgccctctgaggccaggtgctgccacttgtcctggccagagaaatgaagacggctagagctgggccctgcctcctttgtgcccctccccagtcccaaacatcaggatggactcccccacaaccagcctcctggtcctctgccccaggaacccattgccagtgaggaccagacttggatgcgagcagaagctgttagtataggagatgaagacccatggcttggagtcaagagacctgcattcaagtctcagccttgtctcctatgttctgtgtgcccttggtcaatctattgccctcctctaggtcccacatgtcaaatattcaataatggtcaagatgatctgctttgggccagataaaccaggacagaatctctgctccaccacccctagatcagtctcctagctggagactggttgaactgtttccagctcgctaacctctctggccctcagtttcatcatctgcaattgggcaaaaataaccataactcacagggttattaaaattaaattagacacatatgtcatggaacggggacatgacattgttttaggcctatggtgagtgctcagtaaatgttctcttcactcttctccattgttacaaagtcatttcaaaaatatccctgtgttggaagaggcacttcttcatcagccctgagcatccttgctgggcatgccaagaatgcaaggccatgatgttcttacttcagccatttttcagagttgtgtttgcagggaacaacctggagagataaggcaatgaatccccctggaccaatatcaggcttgtttctgctactattaaagcagattccttaagcctaatgcccattgtctgtcatgcaatgtactgcatgagcaggcaactagcaaggcccactgtgtcacccccatggaatttaggttgactccgaaaaaggatacaaaccaacaagacatacatgttgcttgctgtgcctgagtaatcaactaccctttgtctctgacccaggggtcttgtgtcttctattagaatgcatgaaacagtaacaagctaacttatcagcttgcaagtaaaagaaacatcctaggcatatcacaaaatcctgacccccagttcttcacttctctttgtatttacaccctttgcgcagtaatttttcagcagcttccattaatagatggattctattttacatcccttttagtctgtgctggacatttgattttctttggccaatacagtgtggtgaacatgatgatgtaataactcgaatagccccaaggctggttgaactttgaagattgcagagacaatgtccagaaatattgcagcctcctctcagtttctcggaacccagtctctgccatgtgaacaacagggtgccttctggaggcagagaatcacatgggggaaagtccaggtgtcacagctgaggccatcccagatcagcctgaagctagtgaagccctaaacatgtgaatgaactggaccaggatcagcaaagctgcctacatgccccacagctgctcatgtaccaaagttgatcgcatctacatccggaagaaccagctaaatgtctcacagactcattagcaatcataaacctttattgatctaaaccaatgggtattgaagtggtttgtaattggtaatggctactatgcaatctttgtctttacttttgcatttacctggcttctgtgaaaggaacatggaatctgacaccttctgagtatctactatgtgctagggacatgattcgtttgcattatcttaccaccttttaagtagggattatcatccccattttacagatgaggaactcaaggctcagagaggaacagcaatggcctaatgctacccagcagagccaaaattccagaccagatctgtccatggtccctccaccccaagactcctgctgggacccagagttcaaggaactcacgtgcatgatgttcacactcctgttgaagatctttatatagggtttcaggatgttgaaatggaaggcgggcgtcagcatccgacggtggcggctccacttgtcaccgccactcagcagtatcccttctcctagtagggcagccaaggacagtgggcaagagcagcaccttccccacccctgctcaaggttgtccccagcccctttcacctgcaggtactcacccagccagggcttcaggaacctgatggagagatcatccttgggcgcaatagcagctggcatgaatgaggaccatcaggggccatgtagagggcaagagaggaacttcaggtataaggcaaggctccctaccagcactttccctactccatgcccagcatagcaggaagggggccaagggcaaaggacgaagggaggatagaggaagaaggaccagcccaggctgcaacagcacagtagagcaatgacacaacctaacagggcacagcactccccagcacgccttgacatggctcctatatatcccaacatgttctgcaacaactgagcacagctccacactctacaaaatatctttaaaggagcctaggacaccctgtctgccccagcactctctgtcatctcctgaaatggacctgggacctggggcatgtctccaatgttaacatgcctgacatggccacagcatacatgatgagccctaaatgacacatcgtctgacatggacctaagatagtcttgcatgacttctgtgtacctgacaggccccagataggatttaaatatgatttattaaatgtcctggacatgtcccaggtgtaaccaagacttctcttcaagcatgattggaatggattctgagacctggctcaggaagactaaaataataactctgacaattctcaaagggaccctgggtcccagatcttggacaagccacaaacatggccaagagatgacaagaaggagaaaagacaatttcaaaccacatgtcagagaagaaccagaaaggctgggacatgccccaagtgtccttggccacagctgagccacacacatgatgacttctccatatgatcccaggtaaaacatacgagatataatcaggtataatatagaaatcgtaggctatttatgggaccccttggggaaaggtgagctttctgacaagagctgagcttccaagacccatggttgacaccataagagaagggctgccttaaaagaaaaagtgacttccacaatggttgaaagtataataataaaagaaaagaaaaaaaaaaagaaaaggtgatgcagagaaatggtgaaattaaaaggagacaaattcctgatgctgtacattgacacctggatccagccatgcctgaagaccactttctctggactttacactccgttgattccctttatttgcttatagtgcacaaagttgagcttccatcactcacaggtgaaagagacctcagcagccagagagagcaggtgacctgcacagagtcactaagcattttggggtcagagccatagtttctgtgggacgttgctccttcccttctcagcctggtctgtccaaggatgggaagagcagagaataagggaagatcaacaagctggtgtgggatctctactggagattcttgaggcctacaggaggacagcagtgagcgtagggtggatgagtgacaggataaggtagaaggaactgacccatcatagatggatgtcacataaatagcagcccagaatcaccaccagcgacaagtcctcctaccgctctaggctgaaggatggacaaggttggtgccaggactggctgggcccccaaataccaatgatgctcattacatcatcctaccccacacttaaaaaaattcctactcataggtccagacccagctccaacaattcctcctccaggaagccttccagcctgccgcagcagaaccctagttctcctgtgggttttcacacccatctctctcttgcccattcctgaccccatgaatttggggttgtctctgtccagatccatctcctcaagtgtggaggttccttcaggacagggttctggattgaggcttcctggggccctggtggttcccagaacaccagagcagggggtcagatggcaaaggagttggaagacattgagatgaaatttggcaaatacatgaaggaaagcagaagatgcctcttcttctttcaatggagggagaagagagaaagaggggcctgggaactgcaggggcttcacagaagcctaggggagaaggagctggaagcccttggatggaagccccagcacccaccaccacaagctctgcatgggtacctgaggcattggtgatagaccggacgatgtcagggtggcataaaacgatgaaggggaagatgggacccagccatatcctaaagccctggggataggtggctgacatctgggtcaagttcttcaagccttcctctgtagcaatgatctgaaagcaagtcaggggccatcaccccttgtgatggttaattctaggtgtccacttgacagggctaagggatgcccagatatctggtctaacattatttctgtgtgcgtctgtgtttcaggagagattagcatttgaaggtaaactgaggaaggaagacctgcccttccttatgtgggtgggtgtcatcaaatccattgagggcatgaacaggacaaaaaggcagaggaaagggggaatttgctctctcttctgcagctgggacatccgtcttctcctgccctcagaactccaggttctcaggccgttttggactcaggctgaatttacaccaccagcgtccctggtttctggcttgcagatggtatatcatgggaattcctggcctccatcatcacattatccaattcccataataaattctctctgtctctttctgtctccatacatacatgcattagaggtaagaagaaattcccatctaaggagattccatttctagggagaaccctgactaatgcacctccctagaaggagccacggcaagtccccctgcagccaccagatgtggtgcagcctctgcagtgagcagcgtgtctggattctcaacagctgcagggggtttctgctgacctctgctccttctctcttggggctgtcccaggatccgaaggtaaataccaaagcagagagggaagacaagctgtctgctcaagaggatgtgttttctcatcctggaatgatttcagtctggggattgctttatagggaaaggtccccatgggaggtggtttgggacggcagtgtggcctcaggacatatccctagggcagattcccacatccttttgtgtcctggctggtccacatgggctctggttccccccacagataaagggtctgcacactgaggacccccccattctcagcagcccccagggaagcagaggtgactctaatgtccctcaggatggcagctcccacctgggagaacccccccttatgccaggctctgtgctagtgcctcctgtgcacctgtggacatgcccatcaatcctgccatttatgagtgagcagacggaggccacgtcccccaaaggggagggcaagtccaagtaggagggcaaggtttgggagtgtcaaggacggcttctgaaaggggaagagagtggccaaattatatcccggttgagctacagggctcattgggacatctgagtggggaagagcacgtcacccctggaaggggaaggtgtgggagactgcctgcacttctcttctggcccagcagtgtccctccataggggaaggaagtcagagctaattcctgtgggaaagcagcagcccagagatgagcagacacaaggaaatgggtcaggcagggagcagcccctggatagtgggctcaggaggcctcaagtccagagtggagaaggtggggatgccaggagagccctgctctgtgccccacagtactgcaggagccccttggaggtgcactattgtaggaaagacaggcagcaaaaggatccagacaggctggggtgggaggacaggtaggtgagaaaggcttgggatggaactacagaggaatgagtgagtgaggagaggagtgagtgagtgaggagaggagtgagtgagtgaggaggggagtgagtgagtgaggaggggagtgagtgagtgaggaggggagtgagtgagtgaggaggggagtgagtgagtgaggaggggagtgagtgagtgaggaggggagtgagtgagtgaggaggggagtcagtgagtgaggaggggagtcagtgagtgaggaggggagtcagtgagtgaggacgggagtgagtgaggaggggagtgagtgaggaggggagtgagtgaggaggggagtgagtgaggaggggagggagtgagtgaggaggggagggagtgagtgaggaggggagggagtgagtgaggaggggagggagtgagtgaggaggggagtgagtgaggaggggagtgagtgagtgaggaggggagtgagtgagtgaggaggggagggagtgagtgaggaggggagtgagtgaggaggggagtgagtgagtgaggaggggagtgagtgagtgaggaggggagtgagtgagtgaggaggggagtacgtgagtgaggaggggagtgcgtgagtgaggaggggagtgagtgagtgcatgggtagaggagtgagtgagtgcatgggtagaggagtgagtgagtgaggagaggagtgagtgagtgcatgggtagaggagtgcgtgagtgaggagaggagtgagtgagtgcatgggtagaggagtgagtgagtgcatgggtagaggagtgagtgagtgaggagaggagtgagtgagtgaggagaggagtgagtgagtgaggagaggagtgcgtgagtgaggaggggagtgagtgagtgcatgggtagaggagtgagtgagtgcatgggtagaggagtgagtgaggagaggagtgagtgagtgaggaggggagtgagtgagtgaggaggggagtgagtgagtgaggaggggagtgagtgagtgaggaggggagtgagtgagtgagtgaggaggggagtgcgtgagtgaggagaggagtgagtgagtgcatgggtagaggagtgagtgagtgaggagaggagtgagtgagtgaggagaggagtgagtgagtgaggagaggagtgagtgagtgaggagaggagtgagtgagtgaggagaggagtgcgtgagtgaggagaggagtgagtgagtgcatgggtagaggagtgagtgagtgcatgggtagaggagtgagtgagtgcatgggtagaggagtgagtgagtgaggagaggagtgagtgagtgaggagaggagtgagtgagtgaggaggggagtgagtgagtgaggaggggagtgagtgaggaggggagtgagtgagtgaggaggggagtgagtgagtgaggaggggagtgagtgagtgaggaggggagtgagtgcatgggtagaggagtgagtgagtgaggagaggagtgagtgcatgggtagaggagtgagtgaatgagccgcctccctcgcttctctgccggcccacacctcagccaccctctaaacccagctccttgatcccccttcctgccctttgggaattccatccaccctgagatcccagagtcatcctgctgccacactcacgaggtcctggttgaccccaaaaccatttctgttttgggggttgtggaaagtactgaaggcggcggcagttgtcatagaaggcataggtccaggccaggaagccggccaggagccgggaggccccagccagcagcaggagcagccacgggaatgctgccacctgcccgaggcccagccaggacaggctcagctgcggcatcctgcagggcagacaggatggagggtgagatcctgaggcccagggaaagtctcagggagctccagggacagtggagagaagcagggaaggggtgggtggaggcaggaaagggagggctctgggatgaataaacaaggactgagagctaaattccagaaagccccagccaaatccaatagccaagtggcctctagttgcctagtaaccacccagaaaggagaagagagagagagactgattagagtccagaaaggcccagcctgaatcactgggaggttgccaggggtccggttaccaggaaaccaccagtctcccaggccagcagcctggagacaccccagccttgggcagtgcccctccccatcccaggccaggaggctccagtctgaccacccccagcctggcaccttctgtcaggagcagcttgtaccacacaacctcctctcctcttctgctgggagttctttgcctctggcccctgatttagggaaaggtcgtgggaggctgggctgcgctgggctgggccagtcaatctccacagcctgggtgcatctcccttgcctgggagatgccggccaaaacctggggtttggccagctgggtgcagaggaaccagctcagggtgccccagtatggggactggatcctcaggtctcagcatctccctcacagtttagaggggaagttggggagtggttaaaggggactctgagccccaagtttacagccaccctgccctttcaaggcaaggatgtggcaggtaaaagcatgaacttgagagttcacagccacctgagctgggccaggccaacccttgtcccagatcatctgggctcctctccaaacatgggcggggaggatgtcaggtgctgcatcttggtacagacttaggagattcagagacagaagcctctcatctctggcttcacagcctggcaagagttcaagtcctgcctccaggcagcccagggcctgagctgagacctgactgcttgaagcaggaagaaagaatccagtcccaaccctgctgaggattacctgggtcagagtctggggataaagagcccagctggaggagcaaatctagaggctgggctcagcttagaggacagagcagaggcataggggatgaggctgagaggggctgtgagcagacggggtccaggcaggggagggcagagcgaggggaccccgagtgtagtccttgttctgacctgtcctttctctgactgtgggcaatgtggccatcctgggctcaggcttcccatctgggaaatgggatgtcagatgaggccttagagggcgacagaggaaggctcctaagaagagagagctccaaaaagagggactgaagggaaggggatgacaactagcacttgagctgctgtgtgcctgtctctactccatgcgaaagactgtatggaaaacactactgtgtgtacctactgcgtgccagtctcactatataaagtgcacctactgtgtatcaggtactctacataaattctgtctactatgtgccaggtacaccacataaacctcacctactgtgtgcagcatgctctacataatgtaagcttactttgtgcagagtactttatacaaagcgtgcctactctgtgccacatgccatatataaagcatacctactgtgtgccaggtgctccacataaagagtgtctactgtatgctgggcgcccttcacaaatcctgtatcttgagtccctggtcctttatataaaccatgcctgctgtgtgccaggtgttctaaataaagcacacctattgtgtgccagatgtcctacataaaatgttcctcctgtatgttgggccccgtacataaaataaaactgctctgtgcaacatacttgacataaagcacacatactatgtgccaggtacactacataaagaccacctactgtgtgccaggtatgccacataaagtgtgcctactatgtgttaggtactccacgtaaagtacacctactgtgtgccaggtgctctacataaagtgcacctactgtgtgtcaggtgctctacgtaaaccacacctgcttgtatcagatgcccagctggatgacaacgcccaaagctgtcccactaccctcccatcagctctctaggccagagtcccggggattgttggagagacccaaatgatggcatccagaggagggaagatgtccatttaacataaaagcaaactgaggctcagagaggccaggcctctagcccaagttgcagagctcacaggaactcaggtctatgagaccctcaagtccaaatcctttccttctgccgtgctgctccacccccattcattagggtcaatgccatattaatacagggacatttataatggaggaatttcaggcagcgtggtggcccagaggggagctatctggaggctgttgaatcagcacctggctcctcctcccacacccaggatgctccacccaacagatccagggctctcctcctggccctccctggatcctgtccagaattgccctatggggtagactcgggagaagggggtcttgaaggatggggctcctagcagagctgctgagcaggagggtggggaagacagtgctcctgacactagctgggtgttggggagcccctagacctcccccaccccaccaccactgccagctcaatcagccaggggattcaggctgaagggggccagcccctccacccctgtgggtatttctcgtcaggtggtacgagagactgagaaaagaaataagacacagagataaagtatagagaaagaacagtggacccaggggactggcacactcagcatgcgaggacctgtaccggtgccggtctctgagttccctcaatatttattgattactattttcactgtctcagcaaggggagtgcgagggagaagagggtgaacagggtgatgatggggagaaggtcagcagggaaacgtgtgagtaacagaatctgtgtcatgaataagttcaagggaaggtactgtgcctggatgtgcacatgggctacatttatgtttctctttacccaaacatctcagtgtagcaaagagtaacagagcagtattgccaccagcatatctcgcctccagccacagggcggttttctcctatctcagaatagaatgaacagtcagatttatactgagacattcccttcccagggacatgtgggaaacagaggccttcctcttatctcaaccacaaagaggctttcctctttcactactcctcctcagcacagaccctttacgggtgtcgggctggggacagtaaagtctttcccttcccacgaggccatatctcaggctgtctcggtgcggggaaaccttggacaatacccaggctttcttgggcagaggtccctgtggctttccgtgtccctggttaatagagaatggagaatggcgatgacttttatcaagcatactgtctgcaaacatattgttaacaaggcacatgccgcacagccctaaataccttaaaacttgattcaatacagcacatgtttctgtgagcacagggttggggctaaagttacagattaacaacagtatctcaaagcagaacaatttttctttgtacagatcaaaatggagtttcttatgtcttcctttttctacatagacacagtaacagtctgatctctctttcttttccccacatcaggcagctggacttacagcccccagtaagtggggtgcatcacccaatatacccaccccctctgcaaggacagacctcacctgctggcagttccattcctgtcagactcagggagcaaggccagagtttcatgaacaggtgggcagattgctttgagcccaggagttggagaccagcctgatccacaaggcaaaaccgtgtctctataaaaaatacaaaaactggtctcaaacaaacaaacaaacaaacaaacaaaaaacaaaaacaaaaactggccgggcgcagtggctcacacctgtaatcccagcactttgggaagccaaggcaggcggatcacgaggtcaggagatcgagaccatcctggctaacactgtgaaaccccatctctactaaaaatacaaaaaaattagctgggcctggtggcgggtgcctgtagtcccagctacttgggaggctgaggcaggagaatggcgtgaacctgggaggccgagcttgcactgagccgagatcgcaccactgcactccagccttggggacaaagcaagactccatctcacaaaaaacaaaactgaactaaacaaaaactaaactagccaggcatggtggcatgtgcctgtggtcccagctactcaggaggctgaggctggagaatcgcttgaacccataaggcagaggtgctgtgagccgagatttcaccactgcattccagcctgggtgacagagtgagacactgtctcaaaaaaaaaaaaaaaaaaaaaatctagattgcaattactttctttaagcacatggaaaaggacatctatagtcttccagattttacttttggcattgaaaagttagctgtccatctccttagaattaatctctctctttactcccctcttcttaactactgttatttttttctctctttttttttctgaagttttaacacaatgtgttacggtgtggatttctctttatggttgcttggggttcattgaggttctcgaatctaaactgttttcaatcagttttagaaaaatcttggccacaatttcttcaaacaatgcctgtgccctattttttattttacttctgaaattctaattaaacaaaggttacactttctcattctgaccctaatgttttcttccctctcttttatttttatttatttgtttgtttgtttgtttgttttgagacagagtctcaccctgttgcccaggttggcgtgcagtggcaccatcccgctcactgcaaccttcacctctcgagctcacacgattctcctgcctcagcctcccaagtagctgggattacaggtgttcaccaccacatctgactaattttttttattatactttaagttttagggtacatatgcacaacatgcaggtttgttacatatgtatacatgtgccatgttggtgtgctgcacccattaactcgtcatttaacattagatatatctcctaatgctatccctccacccaccccacaacagtccctggtgtgtgatgttctccttcctgtgtccatgtgttctcattgttcagttctcacctatgagtaagaacatgcggtgtttggttttttgttcttgcgatagtttgctgagaatgatggtttccagcttcatccatgtccctacaaaggacatgaactcgtcattttttatggctgcatagtattccatggtgtatatgtgccacattttcttaatccagtctatcattgttggacatttgggttggttccaagtctttgctattgtgaatagtgccgcaataaacatacgtgtgcatgtgtcttcatagcagcatgttttataatcctctgggtatatacccagtaatgggattgttgggtcaaatgatatttctagttctagatccctgaggaattgccacactggcttccacaatggttgaactagtttacagtcccaccaacagtgtaaaagtgttcctatttctccacatcctctctagcacctgttgtttcctgactttttaataatcgccattctaactggtgtgagatggtatctcattgtggttttgatttgcatttctctgatggccagtgatgacgagcattttttcatgtgtcttttggctgcataaatgtcttcttttgagaagtgtctgttcatatccttcacccactttttgatggggttgtttgttttttcttgtaaatatgttggagttcattgtagattctgagctttgttcttttggcttaggattgacttggcaatgtgggctcttttttggttccatatgaactttaaagtagttttttccaattctgtgaagaaagtcattggtagcttgatggggatggcattgaatctataaattaccttgggcagtatggccattttcacaatattgattcttcctacccatgagcatggaatgttcttccatttgtttgtatcctcttttatttcatcgagcagtggtttgtagttctccttgaagaggtccttctatctgatctttgacaacatgacaaaaacaagaaatggggaaaggattccctatttaataaatggtgctgggaaaactggctagccatatgtagaaagctgaaactggatcccttccttacaccttacacaaaaattaattcaagatggactaaagacttaaatgttagacctaaaaccataaaaaccctagaagaaaacctaggcaatacctttcagtacataggcatgggcaaggacttcatgtctaaaacaccaaaagcaacggcaacaaaagccaaaattgacaaatgggatataattaaactaaagagcttctgcacagcaaaagaaactaccatcagagtgaacagtcaacctacagaatgggagaaaatttttgcaatctactcatctgacaaagggctaatatccagaatctacatctgactaatttttgtattttgagtagagatggggtttcgccatgttggccaggctggtcttgagctcctgaactcaagtgatccacctgcctcagcctcccagagtgctgggattacaggcatgagccaccgcgcccggcccccaactcactaattctctcttcaattgtgtctgacatgcattaaacttctcctgggatattaatattgtagctttggttctaaaaattatatatcttttttttcaaatcaaccctgccgctctttacaatgctttatccttgaagatatttccaaaattacatttcgttatttaaacttcgtaagcaatattgtttcatagtccttgcctgataattccagtatctgaaatctttgttggactgtttctggagttatggggaactgggagattctgaaggtgttgatacctgggtcatgatgcaccctgtcaagtttatggggaggaagaggcagagctggagctcttggcccctccactccatctgggcttgctgcaggaacctaccgtgtgaccttggccttgttccctgccctctgtgggctttgtgttcccagaggcaaccatagaggatgcttcttctgagaatcacacctctgtgtctctccagatccctttcctgatatctgttgagaagagacaccatcctgggaaacatcacccagaatccagtcccatttttccaaaatgcttggaattggggcagcccagcccagcctcgctagccgcagggggtggtggtggtggtggtgtcagggtttgatggtggtgtcagggtttgatggtgagatctttagggaggaggtgatgtaaaaactgaaacctcaaatgagaacaggactgagataagtgagagtgagtagtggtggaaggggtcccaggcaggaggaagggaggaaagatggaagaagggaagaagagaggaaggaaggaagagaaggaagaaaagagggagggaagcagcaaaggaaggagggaggcaggaatggagagggcaatcccaaggtcccccgcctccctccttggacttcgattaccctgcatcctgcatcccaggcaggctcctcaagacacctctgggaacgtgccactggggaagacgcctgcagagatgaagctctcaccctgggtgcactgtgcccagggccattacaggcctggctgcaaggcgtccctaaaggtctctgatgaaggtaagtggagtcgtctatttccaaacctgctttccaggatgaagtggcaagagtactgggaggtggaagggagaaggcaagagaagcagggaaaattggaacagagggaggcacaggtttgggaaaagaaacgagagggagcatgggatgatatggagtaggggttctatagcctcagccacctgactccaggctggatcagcctgtcctcactccaagtcccccatagagtccacctactgcctagagcagccccctttccacagcagtcgtggccaccagggtccatgctggggtggggagtggtctctatactaagttgtggaggagggtggttctgagccaagcgggtgacattgagtgtgtcaccatgcatgtgggtgtacttaggcatcacccatgtgtactcctgccttcactgtgtgtgtgtgtgtgcagttgtgtgcgcttgtatgagattattgtagctgccatttcaaagtgccgcaaaccttgtggcttaaaacaagataaatgcattcttgcagggttctggaggctagacgtcttaaagcaagacgtctacaaagctactctccctctgaagattctaagggagaagatgccttgcctcttccagcttctgggtgctctaggcattgattgatttgtagctgcatcgctccaatctctgcctctctcttcacgcgaccttttcctctgtgtgtcctcccctcgtctttgaggggcaccagttgttggatttagtaaacaacctaattcagaataatctcatttttatttttattattattattttttggacagggtctcgctctgtcacccaggctggagtgcagtggcacgatcacagctcactgcagcctcgacctcccaggctcaactgatcctcccacttggcctcctaagcagctgttagcgcaggcacacagcaccacgcccagctaatttttgtagagatggggttttgccatgttgctcaggctggtctcgaactcctggattcaagcaatcccccgccccacccaccttggtctcccacagtgctgggattataggtgtgagccaccacacccagctgatctcatttttggatccttaccttaatgacatctgtaaaagactctattgccacctaaggtcacattattttattttagtttagtttagtttggtttcagggtacatgctcaggatgtgcaggtttgtcacacaggcaaatgtgtgccatggtgctttgctgcacctatcaacctatcacctaggtattaagcctggcatacattagctatttttctgaggctctccccacccctgccctaccccaacaggccccagtgtgtgttgttcccctccctgtgtccaaaggtcacattctgaggttctgaatgaacatgagttttggagggacatgattcaacacacacagtgccctcacacatggaatggctgtgtgtctccagtttattccagccccagatgagcaccaggcatttggcaagggctccataggtgtgtgcagaatgagtggtggtgtctctggttctggctgggggtgtcaccgccagtgtgcatttcagagccagtgcgactgtgtggcattgctcagatctgtctgcctttgcatctgtgtgttcagttgtatgataaagtgcataagcagaaagagctggatgagttgaattgtgtctcctttgaggagagagggcactggagcagggtctgggagcctgcgtgtgtgccagcctgggattctgcatttgcaccagcctgggattctgtgtgtgcaccagcctagggttctgcgtgtgcatcattctggagttctgtgtgtgcagaagcctgaggttctgcgtgtgcaccagtctggggttctgcctgggagccctcagctgggagaaggaccctgacctttgtccttccctaggtctagacttgtgcaggggagttggagagcccccttggagatttctgctaaggtgctgttctgggaaagagtgggacagaatgtgccagagagctgagagagccctttctgtatttctcttttcttttttttcttttcttttctttttttttttttgagacagggtctcgctctgtcacccaggctggaatgtagtggcatgaacatggctcactgcagcctcgaattcctgtactcaagcaatcctctcacctcagcctcctgagtagctggaactacaggtgcacatcaccacgcctggctaatttaaaaacaatttttttggtaaagatgggatctcactatgttgcccaggctggtctcaaactcctggcctcaagtgatcctcctgcctcagcctccaaaagtgctgggattataggtgtgagccactgggcatggcccctttctgtaatttttagtaacatttgtgcatttaggagcagggaccttggagcctgttggtagccaggagagaggaagaggtgagctgcacaagggagggagtgctggagggtaggaggcatttacagtgacagaagaaggttcatctggaatggggttgaagtccctgactgtcacagtgccaatgtgagtcacctggcaggcaaggatgagtggcaaccagctcagcagacagcaaacagcaatgatgacagagatgatcacgacaacgtcagctggcagccttgagaactgtgtgctaagcacttggcatcccgtcgcccagggaacccccagggcaggtctctggttatcccagcatacagtgagaacctgggatttgaaccatgggtctgcgtgactccacggcctggatatgtcttagagaattgtctctggctgtcagaagagggatggggcagaggaggggagattggtaagcaccgtgggctgagagagagggcgtgaggccagagctggggttgtgtccctgctatagagggggagggagtgaggctcagagatgacagatgagggagaggagggatgaagaagaggagggagttgaggctatgctgcagttgttggcttggctggctgggtcccctccagcccacacatgctacttttctgtgtggaatgatcattcctaacttgagccaaactgtccattttccaggtggtattctgagtcctccaagcattgggctaaccttggctctgagagatagttagtgacaatcttctaggtagggctaggaggaagtgtaatattggggtgaaccaggtcccaggtaagtattcgaaaacgtgctatcacaacagtagctttctcatagaagtaaaaagtaggacagaggatactagaggctgggaagggtaggcagaagggagagatagggagaaattggctaaaagatacaaaattacaaatagaggccagggatggtgactcacgcctgtaatcccaacaattcaggtggccgaggcaggcagatcacttgaggacaggagttcgagaccagcctggccaacatggcaaaaccctgtctctactaaaaatacaaaaattagccaggtgtggtggcgggcacctgtaatccgagctactcgggaggctgaggcaggagaatcacttgaacccgggaggcagaggttgcagtgagccgagatcatgccactgcactccagcctgggcaatgagagcaaaactccatctcaaaacaaacaaacaaaaataagtaaatacaaataaaatttaaaaacagtagtcttcagttaatcaaagatatctatatagttatatagataccatacacacacacacacacacacacacacacacacacatttttgttggacttaaactacagatgtactccgcaactcctcagtgatattttatcatccttatttgatcatcattgatatgaacaacaggggtgatctcattttatttattcccatttatcatcatgtctcacttctacttcccttccctgcccccaccacagacagctgttccattttgttcaaagtgtatccctttgtttgcatgaattattattatttttttttttttttgagacggagtctcgctctgtggcccaggctggagtgcagtggcgccatctcggctcactgcaagctctgcctcctgggttcatgccattctcctgcctcagcctcccgagtagctgggactacaggcccccgccaccacgcccagctaatttttttgtatttttagtagaaacgggttttcaccatgttagccaggatggtcttgatctcctaacttcatgatctgcccgtctcagcctcccaaagtgctgggattacaggtgcatgaattattattaaattctccagcctaggtgacagagtgacacttggtctcaaaaaaaaaaaaatcctctcttttagcttttttgaaaatatgcaataagttacaattagccatattcacccaccagtgctgcagatcttactggaattttgccagtttgtcagctaattccctctttatgttctagggcacaattcatttcatttagttgttatttctatttttcattatcatttttttattcgcattttttaattttccttttattctaaagattattatgtgatatgttactgtggcaatatcacgtaactcaacctgatatttatgttctaaatatataggtagttttaagggtcctcatcttagtaatttccaattttatttcagaatgctcagaaaacctgggtctttcttttattagcacttgctacaaattaagagaactttagtctgaccatccatgccggccctcaatcttaaattctttgtttgtttgtttatttttgagacagggtctcactgtgtcgcccaggctggagtgcagtggcgtgatctcaggtcactgcaacctctctctccttggctcaagcaattctcccacctcagcctctcaggtagctgggattacaggtgcatgtcaccatgcccaggtaatttttgtgcttttagtagggacggggtttcaccatgttggccaggctggttttgaactcctgacctcaagtgatccacccacctcggcctcccaaagtgctgggattacaggagtgagctactgtgcccggcccttaaccttaaattcttaagtgtttattccaggccctgtggcaggtacattatgagcataatcttattaaatcctcataacaaccctgtcaatttgggattattatccatttcttttagggatgagaaaactaaggctcacaacaatcaagggaccaacccacggtcccctagctctgaagtggggatccaacccaggtgtggctgaatagagaccaccgagatttaaaaataggaataataattattatttttatcagtattactatttgtgaggttcttactacgggccaagacttgtgcaaagcaagtaagatgcatgatcttatttaaacctttacacagtttgtttttgtttttgtttttgttttatgagatagcatctcgctctatcacccaggctgaagtgcagtggctcagtcatagctcactgcagccttgacctcccaggctcaatcgatcctcccacctcagcctctcaactagccaggaccacagacatgcaccacaatgtgtggcacattttcttatacttcgtagacatgggggtcttgctattttgcccagactggtctcaagctcctgggctcaagtgatccttctgcttcagcctctgacgtagctgggaccacaggcatgcaccaccatgcctggctaatttttttttaaatttttattttgtagagatggagtttcactatgttactcagggtggtctcaaactcctggcctcaggtgacccccctctgcctccgcctcccaaagtgctgagatgacaggtgtgagccatcattcccaggctaaacttcagcacattattattaacatatttttggccaggcgtggtggctcaagactgtaatcccaacactttggaaggctgaggaaggtggatcacctgaggtcaggagttcgagaccagcctggccaacatgctgaaacccatctctactaaaaatacaaaaatcagctggcgtggtagcacatgcctgtaatcccagctactctggaggctgaggcaggagaatcacttgaacccaggaggcagaggttgcagtgagctgagatcacaccactgcactccagcctgggtgacagagcgagaccccatctcaaaaactaaaactaaaaataaataacatatttttgcacatggagtaaccatggcttggacagatgaagaaggcgctctcagatgtcctcccaggtgggagtcactagacacccctgtgctcctaaccactgggtcttctttcctctctccaccaactaggggtggccgccatgcaggggctaaaccacacctccgtgtctgaattcatcctcgttggcttctctgccttcccccacctccagctgatgctcttcctgctgttcctgctgatgtacctgttcacgctgctgggcaacctgctcatcatggccactgtctggagcgagcgcagcctccacatgcccatgtacctcttcctgtgtgccctctccatcaccgagatcctctacaccgtggccatcatcccgcgcatgctggccgacctgctgtccacccagcgctccatcgccttcctggcctgtgccagtcagatgttcttctccttcagcttcggcttcacccactccttcctgctcactgtcatgggctacgaccgctacgtggccatctgccaccccctgcgttacaacgtgctcatgagcctgcggggctgcacctgccgggtgggctgctcctgggctggtggcttggtcatggggatggtggtgacctcggccattttccacctcgccttctgtggacacaaggagatccaccatttcttctgccacgtgccacctctgttgaagttggcctgtggagatgatgtgctggtggtggccaaaggcgtgggcttggtgtgtatcacggccctgctgggctgttttctcctcatcctcctctcctatgccttcatcgtggccgccatcttgaagatcccttctgctgaaggtcggaacaaggccttctccacctgtgcctctcacctcactgtggtggtcgtgcactatggctttgcctccgtcatttacctgaagcccaaaggtccccagtctccggaaggagacaccttgatgggcatcacctacacggtcctcacacccttcctcagccccatcatcttcagcctcaggaacaaggagctgaaggtcgccatgaagaagacttgcttcaccaaactctttccacagaactgctgaaatggctgactttctctcaagagatgtagcgaatgggaacactttagtcttcctcctttatttcttttcctttcctccctccctcctttcctccctccctcccttccttccttctttccttcctccctccctcctttcctccctccttctctgacctacagtccaccctccctcccccctcctccttgccttccttccatccttcctccctccctccctcccccttccttcttctctgcctacttccctctttcccttctctctgtctctttctgtttctatacctctctgtctctgtcactctctttctccctccttgttcttttgtttttgtttttgtttttgttttgactgagtctcgttctgtcacccaggttggagtgcgttggcacaatctcggctcactgcaacctccacctcctgggttcaagcgattctcctgcctcagcctcccgactagctgggattacaggcacacaccaccatgcctggctaatttttgtatttgtagtagagacggggtttcaccatgttggccaggctggtctcgaactcctgacctcaggcattatgcccacctcagcctcccaaagtgctgggatcacaggcgtgagtcaccacacccagccctgacttttttactgtagacatcccagtggtttcttattggggttttgatttgcatttccccaatgactaatgacaggctttaggtgcttaacacatgtgagttattttacttcacagggaagataggattactaactccattttgtttgttcgttagttggttggttttatacacggtcttgctctgttgcccaggctggagtgcagtagtccaatcatggctaagtgcagcgtcaacttctgggctcaagcaattctcccacctcagcctccagagaagctagcactgcagatgcatgccaccacaagggtaactttgtattttttgtagcgacaggatctcacgatgttgcccaggctagtcttgaactcctggcctcaagcaatcctgccatctcggcctccccaaatgctgggattacaggcatgagccgtgacaccggccaagttctattctgaagatgaggaagctaagttatgaagagattaagttaattagccaaaggtcttgtcactgacatggaaaagctagaattgaacctattctttaaattagagctggggataagaagtacacatttctcagggcctgtgaagaggggaagtcagtctgttccagaaagggaggaagagctggattgaaaacaagagacacattctagctagcaccaatggagtgagcccagaactagaaatatgctgtctctatgggtttaggaggaatcacccagtgtcagagaattagggatacaccttatgagtttggccaaactggctgtagtatttctgtgttttttagtagacgtgttaatacgaaagagtgtgtcacattcaaatattaaattgggccaggcacagtgcctcacacctgtaattccaaaatttggggaggccgtgacaggaggatcactggagtccaggagttcaagaccagcctgggcaacaaagtgaaaccttatctctacaaaaaaattaaaaaattagctagacatggctgcatgtgcctgtagtaccagctactcaagaggctgaggtgggaggatcacttgagcccaggaggttgaggctgcagtgagcagtaattgtgccactgccctccagcctgagtgacagagtgagaccttgtcccaaaaaattaaattaaattaaattaaacgctttgcaaaaaaaaaaaactacccattaaatccgggttcctgggttatattagaagttccggccgggtgcagtggctcatgcctataatcccagcactttgggaggctgaggtgggtggatcacgaggtcaggagtttgagaccagcctgaccaacatagtgaaaccccgtctctactaaaaatacaaaaaattacccgggcgtggtggcacatgcctgtaatcccagctactcaggaggctgaggcaggagaattgcttgaatccaggaggcgaaggttgcagtgagccgagattgggccatggcactctagcctgggtgacagagcgagactctgtctcaaaaaaacaataaaaaaaagaagaagaagttctagggcacttaactactaatatctgggggggcattctttgcctcccctataaaatgtaaagggatcccaaatgttaaacttccacccccatcacctcgagttgtcatggaaaagagaatgttataccctgtttataccccacgtgtcctggggtgtagctagtgctttctagctgatcatgattctgaagataccttggaataggctgggaaacaggtaaaaatcagactgtgtgagtttgaaagagtgcaggaaaggtggcttctgggttatatccaagatgtgtcattgtggttccccgtggtgatcagaaaagcgagccagcttgctgtagtttggttgaccaatgtccatgcattctgaaattaaaataagctttgtgattactccttcactttatttagtagtagtcattgtgtaaatttgaaacaaccggagaagttgggcttagtgttgtttttatacatggcatattctagaccctgagggccaggtcagggtgaggtgagggagacacctcacctcctttaaacattatttaaaatgttgacattttgttcaccgtggattttttttgcattcattttggttttttaaaatattgcattaggccgggtgtggtggctcactcctgtaatcccagcactttgggaagccgaggcaggtggatcatttgaagtcaggagttcgacaccagcctggccaacatggtgaaaccctgtgtctactaaaaatacaaaaattagctgggtgtggtgtgcgtgtgtggtcccagctactcgagaggctgaggcaggataattgctttaaccggggagacagatgttgcagtgagtcaagatcgtgccactgcactccagcctgggcgacaagagtgacactccatctaaaaaaaaaaaaaaaaaaaaaaaagcataaacgtaatttatcttgattgctgaattttttgatggccccttacattgggtgctcaaagtgactgccttatctccccacaaaggaaaaacaaaacgcttgcatttttccctcaaaagactaaaaaatagaagccatcattaatttaaaataggattaagtgccaaaagttcagtgagaacacagcaggtctgggggtgtcaactctccatgccccaggtgtggaaacagtccccctctgcctgctagctttggccagccccctcccccgggaccctgtcctcatctccccccattaatcagccttcactttctgaagtctcacacctcctgcattcctcactgtttgccaagccttgataatggtcccctctgtgattggtatccccaaggcaggaccagagcccagagaggtgattaaggggcaggagatcccaggcttcagggacctgctccctgagttccttggagcccagtgttgtagtcctaattgctagagaccaaggccagcttgaaagatgtgatctgtgtccttcacttcttttgttcttttcttccccggtgctggcctaacctccttgcatgtggataaaaattcaatcccctcctcatggaggttgtccctcttgtttcacccccaaaatcctccagtttctgtctgccaagcagctagaaggagctttttttttttttttttttttttgagatggaatctagctctgtctcccagcctggagtgcagtggtgctatctcggctcactgcagcctctgcctcccgggttcaagcgatttttctgcctcagcttcccaagtagctgggattgcaggcacatgccaccacacccaactattttttgtatttttagtagagacggggtttcgccatgttagccagactggtctcggactcctgatttcaggtgatactaccacctcggcctcccaaggtgccgggattacaggtgtgagccaccacatccagccagaaggatctttctaaagggaaactctgaaaaatcatccctctacttaaaccttctgtttctcttaggatacagtatagactctagtgtgatcatcagggctgcgtggccaggtctatacttcatccccaaattcattctttgaccctatagcccaatgggctccctgctgtcccggcagtaaaccaagcacacccggaccccaggaaccttgcatctactcttttttttttcttcagagattggggcatgaaatcttccattcctctttgcattgctggtttgcattattgggggtattagaagacactggcttttggcaagaggagtctagattccaggtttggtgctaactgacaaagtatcttgcggcaggtagaaataatcagttttcttgcattttttccctcgaaagactaaaaaatggaagccatcattaatttaaaacaggattaagtgccaaaagttcagtgaaaacacagccacatctgtgttttctctgtgttagtatctcacacacaattccactccaaatacatccctgatgctgatgaaacgttatgtatataattgtatgttgtctacaaggtaaaccttaaaagtatgacaaatagaggttactatatgttcattgaatgtctttttttttttttgagagagagagagagagagaaataagatctcactctgtcacccatgctggagtgcagtggcatgatctcagctcactgcaaccttcacctcccaggttcaaacaattctcctgtgtcagactccctggaattacaggcgtgccaccatgcctggctaaattttttttgtgtttttagtacagacagggtttcgccatgttgcccaggatggtttcaaactcctggcctcaagtgacctgcccaccttggcctcccaaagttctggggttacaggcatgagccaccacgcctggccccttgcatctactcttgcttttgcctgtaatacccttcccccacctgctcgcacactcccttcggtcttcctgagggtcacctcctcagaaagctctttcctgacttctccacactcggtcaccacccctattacaagccctcatagcaactcacttaggtccctcagagcttttatcacaagttcccatatatattaattggtgcaattatttgtttatttatgtcttcctctttctagggcagacattgagatcgggatgtcttatctaattggttcaaccctgtcttcccagtggtgcctagaaaaatgcctggtacacagtaggtgctcaataaatgctttttgagtgaatacagcagggtttgtcattctgcgcccggctgacatttggggacagtggtgggggctgttctgtgcattgtaggatgttgagcagcgtcactgactttgacatactaggtgctgtaacatacatatcctctgcctcgtttcaaagaccaaaaattgtctctagaaatttccaaatgtgccctgggaaggggagcaaaatcaccattggcagagaagcatgggaatgcagagactgggctaatagagctccagctgcgtcttacccctcttggctcccttagaactttgctcatgggatggttcgttttatgtgtcaccttgactgggtcaaagggatgctcagagatctgattggatattatttctgggtatgtttatgaaggtgtttctggaagagatgaacatttggattggtgaactgagtaaaacaggtgggccttcccagtgtgagagggcatcctctaatctgtggagggtccgaatagaagaaaacagcagaggaggttggactcacattccctttgcctggcaatcttcttgctcttactgctcctggttctcaggccttcagacccaggttggactctacaccattcgttttcagctattggccgagtcaacactgtctttcctggttctcaccttgcacatggcatatcatgagacttttcagcctccataattatgtgagccaataccatatatatacatatatatataattttttttttagatggagtctcactctgtcacccaggctgcagtgcagtggcatactcttggctcactgcaacctccatctccccggttcaagtgattctcctgcctcagcctcctgagcagctgggattacaggcacccgccaccacgccccgctaatttttgtattttaagtggagatggggtttcgccatgttggccagactggtctgaaactcctgacctcaagtgatccacccactttggcctcccaaagtgctgggattacaggcgtgagccactgcacccggcccttataatatatatatatccatctaccttatctatctacctattcgttacctatttatcatctatctatctgtctatatcttattggttctgtttctatgaagagccctgactaatacaatccgtatcttggtcacagccctgatatttctctgtgtatcactgcaccaggtaacatgcaaatgcctcaaaagctgggaacagaaacaaacgcttgtctatatccccaaaattagcacaagtctggagacaaagaaggccacaaataattattaaactaatcttagcccaggtatggtggcttacgcctgtcctttattggttgggcgtggtggctcatgcctgtaatcccagcacttttggaggtcaaggcaggcagactgcttgagctggggatttcaagaccaaccttggcaacatggtgaaaccctgtctctacaaaaaatttcaaaaattagccagctgtggtggcacatgcctgtggtcctagattctcaagaagctgaggtgggagaattgcttgaggttgcagtgagccatgattgcaccactgcactccagcctgggcaacagagcaagaccctgtctcaaaaaaaacgaaacaaaacaaaaacaaatgacaacaaaaaacccaccaagcctgtcctttattaatgggtatatctaatgactttctgatattcaagcagaaacctttaggcagtgagagagaagccatgtggacatcttgtggggagaagggaattcctggtagtgggcacagcatgtgcaaaggtcctgaggtaggagcatatttggtgtgtttgagggacagtggggaggctagagcagagtgactgagggaaggagaaaagggaggtgaggtcagagaagcagcagcagggcccagatgtgtagggctttgttggcactgtaaaaacttcggatttctgtagtcccagcactttgggaggccgaggcgggcggatcacgaggtcaggagatcgagaccatcctggctaaaacggtgaaaccccgtctctactaaaaatacaaaaaattagccgggcgtagtggcgggcgcctgtagtcccagctacttgggaggctgaggcaggagaatggcgtgaacccgggaggcggagcttgcagtgagccgagatcccgccactgcactccagcctgggcaacagagcgagactccgtctcaaaaaaaaaaaaaacaaaacttcggatttccctgtaagtgagacggagtcattggaaggttcttagtagaggagatataatacaatgtacacctcctaggctcaagcaattctcaggcctcagcctccggagtagctgggattacaggcacacgccaccacgcctggctaacttttgtatttttagtagaaacagggtttcactatggtggccaggctggtcttgaactcctgacctcaagtgatccacctgcctcagcctcccaaagtgctttttcaatcataaatgtcactgctctaaacatccttttgtttacactgacatggaatgtctataagatgtcaatcaaattggtggaaattaggaggcaggatttcaacccaggtccttctcactcaaacacgactccccacacacacttacccactgccctggggggtaatgaggtttctttctcacaggaaatacataagtcaacattctggattgttcagtgttgtaggattaaattagtccactttaggaatatttgttaagaattgatatatcgtccaagtgccatgctgatgctggatgtgataatgtacgagatgatcaaacctcatgaccacatgcagctggcagcttaaaggatcacaataagttagcataagacatccagtgcccaactcatagtggatatccagcctctttccagggtctctatccatttggataccagcaggatcagaggccagtggggtcttttataaagaaaagaaaagaaaaaaagaaaaaaaagagagaaaagaagggaagggaagggaagggaggggagggaagggaacggaaaggaaaggagaaaagaaaggaatggaagggaagggaagggggagggaaggagaagggaagggaaagaggagggaaaggaaagggggagggagggagaagggggagggaagggggagggaaggagaagggaagggggagggaagggggagggaaggagaggcgaaggagaaaggaaggtgaagggaagggaaaagaaaagaaaaaaaagaaaagaaaagagaaaagacctgacttatgttcccgcccagatggctctgttgtcaggagaggggagcatcttagctcagtgcatagaagttactcaagaatttctacaagactaaaacttattttaaaatcatgaaggactgttgaatttgtagaaatattccatctgtgttccaaggatgcacgcttcagggtttgcagagggttgcaactgtcttcctgtgccacaaaagactctaaagatgctgagatgtttcatttgaagaaggaccagtcctccagaaattaggatcccactgtaaaaaggcaatgcttgaagtgttgaatggagaagacttggaatcagaaaagactgacattgaagcttggctcttccaagttggttggtctctgatgagccatgcatgttttgtgcctcagtttccccctctatcaaacagagggactgtgattatatctgctctcactcccaccttgtgaggcgctaatgatacaacatgcctggtgggtaacaagatgcatgaactgtagcacatattctgcaaagggagcttctctgagtttccaagttttgattgaaatcgtttcccacatcctcacttttcatgctaatgtgggatttttttttaaattttatcattattatactttaagttttagggtacatgtgcacaacgtgcaagtttgttacatatgtatacatgtgccatgttggtgtgctgcacccattaagtcatcatttagcattaggtatatctcctaaagctgtccctccccccattcccccaccccacaacagtccctggtgtgtgatgttccccttcctgtgtccatgtgttctcattgttcaattcccacctatgagtgagaacatgtggtgtttggttttttgtccttgcgatagtttgctgagaatgatggtttccagcttcatccatgtccctacaaaggacatgaactcatcattttttatggctgcatagtattccatggtgtatatgtgccacattttcttaatccagtctatcattgttggacatttgggttggttccaagtctttgctactgtgaatagtgctgcagtaaacatgtgtgcatgtgtctttatagcagcatgatttataatcctttgggtatatacccagtaatgggatggctgggtcaaatgatatttctagttctagatccctgaggaatcgccacactgactcccacaatggggaactagtttacagtcccaccaacagtgtaaaagtgttcctatttctccacatcctctccagcacctgttgtttcctgactttttagtgattgccattctaactggtgtgagatgatatctcattgtggtttccatttgcatttctctgatggccagtgatgacgagcattttttcatatgttttttggctgcataaatgtcttcttttgagaagtgtctgttcatatcctttgcccactttttgatgggattgtttgtttttttcttgtaaatttgtttgagttcattgtagattctggatattagccctttgtcagatgagtagattgcaaaaattttctcccattctgtaggttgcctgttcactctgatggtagtttcttttgctgtgcagaagctctttagtttaattagatcccatttgtcaattttggcttttgtaatatgggatgttttgactgtgggttgttttgactgcttgaatgatggagaattcacactttagaaaaaaatgatgcatagctcaaacacaggaagacctattgtcaataaatatataaatactatacagtagggtcaatcttaaatccctgcccattgggaagagaccatgaggtaaactttcttttttttttttttttttttttttgagatggagtctcagtctgtcacccaggctggagtgcagtggtgtgatctcagctcactgcaacctctgcctccatggttcaagctattctcctgtctcagcctcctgagtagctgggattacaggcacctgccaccacgcctggctaatttttatatttttagtagagatggggtttcagccatttgcccaggctgctcttgaactcctgacctcaggggatccacccaccttggcctcccaaagtgctgggattacaggcatgagccactgcgcctggccatgagataaactcatcctggggtctacactcaatgtccagattcaacagagagctcctggctggcccatgagccgtgtcaacttctaacacagcattcggtatctcacagtgtgacttttttccttgatccaaccatgaagacatctcagtctctccacaactattcaagactcacacttgaaattctaaggtttccttgatgtttaaagagagtctgtttattgctatttctaacttctattgcatagatctgtgcaatgctgaaatttagggtacttttctctcctctgctataatctggagtagccttacaaaatctgagttgtagctacctggtgcggcactcatagagagtggggcatgaaatcttccctctctctttgcattgctggtttgcattattgggggtattagatgaccctggcttttggcaagaggagtctagatggaggtttggtgctaactgacacagtttcttgcagcagatagaaataatcaaacctggttttctctgtgttagtatctcacacacacttccactccaaatacatccctgatgctgattaacctttgtgtttataattgtatgtcgtctacaaggtcccttgtaaaccttaaagcatgacaaatagaggttactatatgttcatggattgtctttcttttaggggggaagggatagggtctcactctgtcatccatgctagactgcagtggcacagtcatagttcactgtaagctcaaacttctggacttaggcagtaatcccagttcagtctcccaggtagctgggactacaggcatgtaccaccatgccaagctatttttttctaagtttttgtagatatgcagtcttgctatgttgtcaagtctagtcttgaactcctggcctcaagcaatcctcctgccttggcatcccaaggtgctggaattataagtgtgagccacagtgcttggctggaacgtaattttctttttttctttctttctttcttctttgagacagtctcactctgtcgcccaggctggagtgcagtggtgtgatctcagctcactgcaacctccacctaccgggtcaagcgattcttatgcctcagcctcccaagtagctagggttacaggcatgtgccaacatgcctggctaatttttgtatttttagtagagatggggtttcgccatgttagccatgctggtctcaaactcctgacctcaggtgatccgcctgcctcggcctcccaaagtgctgggattacaggcatgagtcaccacggaacgtaatttttaacaatagccttcggtaatccaatttagttgttcccagtgaatttctcctacatcattacatttttttctgggtagagtttactgaagaaggtcttcttcatggcgaccttcagctccttgttcctgaggctgaagatgatggggctgaggaagggtgtgaggaccgtgtaggtgatgcccatcaaggtgtctccttccagagactggggacttttgggcttcaggtaaatgacggaggcaaagccatagtgcacgaccaccacagtgaggtgagaggcacaggtggagaaggccttgttccgaccttcagcagaagggatcttcaagatggcggccacgatgaaggcataggagaggaggatgaggagaaaacagcccagcagggccgtgatacacaccaagcccacgcctttggccaccaccagcacatcgtctccacaggccaacttcaacagaggtggcacatggcaagcaaaatggtggatctccttgtgtccacagaaggcgaggtggaaaatggccgaggtcaccaccatccccatgaccaagccaccagcccaggagcagcccaccaggcaggcgcagccccgcgggctcatgagcacgttgtagcgcagggggtggcagatggccacgtagcggtcgtagcccatgacggtgagcaggaaggagtgggtgaagccgaagctgaaggagaagaacatctgactggcacaggccaggaaggcgatggagcgctgggtggacagcaggtcggccagcatgcgcgggatgatggccacggtgtagaggatctcggagacggagagggcgcacaggaagaggtacatgggcgtgtggaggctgcgctcgctccagacggtggccatgatgagcaggttgcccagcagcgtgaacaggtacatcagcaggaacagcaggaagagcatcagctggaggtgggggaagacagagaagccgacgaggatgaattgggtcactgtggagtgattggctctctgcatggaggctgtgcctggggtgagatgtgacagggagatgtcagttactgcatgaagaaaagttctcagccttccccatacctggatttgcccaagggactgctcttgataaatggtttggttccattcccactctgtacctcctataatttaatactctcgtcaacctagtgagaacggtactattttttcaacccccttttgaagtaccttgagcatagtcattgagaatattgaaatgtagagcttgctcaaggccaagctgttgaaacggtagatcagagactggaacccatagctgggctggctctaaaacctgtacccttcactatttctctatgttgccccctgcccccaaacgaaaatgctccaggctggcatggtggttcacatctgtaatcccagcactttggaggctaagggggaaggacggcttgagcccaagagtttgaggttgcagcaagctatgatggcaccactgtactccagcctgggtgacagagctagactctatctcttaaagaaagaagaaaatggccgggcacggtggctcacgcctataatcccaacactttgggaggctgaggcaggcggatcacgaggtcaagagatggaggccagcctggccaaaatggtgaaaccccatctctactaaaaatataaaaattagtcgggcatggtggcacgcacctgtagtcccagctcttcgggaggcagagacaggagaatctcttgaacctgggaggcggaggttgcagtaagccgagatggcgccactggactccaccctggcgacagagcgagtctctgtctcaaaaaaaaaaaaaataaataaataaaaagaagaagaagaaaaacatattcctttgctggaacttccattcattccttctctgccctcctactcccttctgataaatcacgttcatcccccagctccaggtatcatgagacgttcccacccatggctgcaactccttggaacagggcgcgtctctaaatctgaaccaaccagacttcctctggggttatccatgtaggaaagcagaggcaggagactgtgttgctctaaggaaggagccagaaatcatgctttggttgttttccagctcccatgaggtatgcctctatgttctgaggcaatgaaatgtagccatcagacagaaagaagggcgtgggaatcagcagggctcagttcaaatccctcctctggctgttgtgtaatgattatttatttatttatttatttatgtatttatttatttatttttgtagagacagagtttcattctgttccccagactggagtgcaatggtgcaatcatagttcactgcaacctcaaactcctggattcaagcaatcttcctacctcagcctcccaagtagctgggactacaggcacacaccacctcacccagctaatgttttattttttattatagagatggcatcttgctatgttgcccaggctggtctggaactccacccctcaagtcatcctcctgcctgggattcccaaagtgctggaattacagaagtgagccactgcatctggccaatattttgtaaagttgagcagattcctttatctctctgtacctccctacctcaaagggttgttgtgggaaggaaatgagcttttcttaagtgacctggcatgcagtagatgctacatatgataattaatacagtaaatgagtgactgtacatggtctttgctcagtaactttaatttcatgagatttctatgtgtctttatgaaacaattaaatatattcaattttttttttttcaaaagacagggtctggctctgtcacccaggctggagtgcagtggcacaattatcatagctcactgcagccttcggctcctgggcttaagcgatcttcccttctcagcccccttaaatagctgggactacaggcatgcaccaccatgcttagttaatctcttttttaaaaaatttggcaatgtgtgaccaggtgcagtggctcacgcctataatcccagcactttgggaggccaaggtgggcagatcacttgagatcaggagttcgagaccagcctgggcaacatggtgaaaccctgcctctactaaaaatacaaaaattagccaggcatggtggcacaggcctgtggtcccagctactcaagaggctgagttaggagaatcgcttgatctgggagatggaggttgcagtgagccaagatcacaccactgcactccaggctgggtgacagagcaagactccttctcaaaaaaaaaaaaaaaaaaaggagtaaactaccactctgctttctgtttctacggatgtgtctgttctgaacattttacataaatggaatcatacgagatggggccttttgtgtctcatttctttcactgaacataatgttttagggttcatttgcattgtagcatgcaattgtaacagtattaaaacaccacagcatgcgtctgagctttattcctgtttatggctgaacgattttccattttatgaatatgcgtcatcttttcatggacatgagggttgtgccccacctgttggccttcgtgaacaatgctgcaatgaaaatgcttgtagcatttggaacctatcagtggtttccaggggctggggtgaggggagaatggggagtgactgctaatagatacggtgtttccttttgggctaataaaaaattattacctttgtctggaactaggcaaaggtggtgttagtgcaacagcataaatgttcttgatgccactgaattgtatacttttaagtgtttatgtggaaatccagtaataaaaggcaaatgcagtgggctttctcaaaaataaaataaaataaaaataaagaaataaaataaaataaaaataaagaaaagaaaataaataaataaataggtaaatttcaggttgtatgtatgttattacaataaaaagatcattttagaaagggtagttcacttccctttaagtgggctcaggtcctcagtcaagccctggcagatttatagtgagagatgaaggaagaaccagctcctttggtgagcagaggctgcattctccaaacatcgttggtctccagagtttcttggtctctcttcctggaatcactctcgttttgccccacttctgggtcagtacttgcccgtagctccacagaatagtggcccccacagcaccaccatgtcccgccactctgagatcttagaggagtaaatgacttggaaacaagaacctccaagaagaggccaaatgggcgagattggtgccctggggtggtgctcacaaaccctctgtggctccccagtgcctaaggcagggtttctcaaccttgggactgttgatatttagggccaggtcattctttctgtggggagctgttctgtgtctcataacatgtttagtagcatccctggtctctgtcaactcaatgccagcagccattgctcagtcatgacaaccaaaaaatgtctccagaaaacacccatgtctccatggggctcaaagtcacccccagttgagaaccgctgatccagagagtgcagccgcaactccttcacaccctccctctgctgggatccccattcctccacttcttcacctggcaaacccctgtttgttgttaagattcagcttagatgtcacctcttccatgcagtcctcctggatatttcttcccaaggcatattaagccacccattcctgggtgctttcaaaataatgattcccagttaatggtaacagcaggcattggttcaattctcgctctgtgcctcctacaagtaactttaaagctccttgctcatgactttgttatgatgtttgccgtgatatgtcatgttggagctgtgtctatccctggaacctgattgtgaatccctgaagccaaggactgttgtgtctacagcaccagtgctgtgtactcaacaacaacaccgatgagagcagctgccctttactggatatgtcctacagaccaggcactgcactcacatcactcatgctattcttattgaatatttacccccacattagaagtcatctgctctgatccctattttacagacagggaaactgaaacccacgacacatcacttgccttaggtgccttgagtctgaagtgggggcccagggtctgagcttaggtctgattgatctcaaagcctgtcttttcctaacctcttgttatactcaccagttgctggtggctgtttcaaaggccactaggagatgctgcttccccatgactgaccgtctacacactcttgttcatatcaattcagatcacaagaatcgacagcgagtgagtgaacaaggtggggggagagagagagagagaaaaggaggaggaggaggaggaggaaaagaaagaaaaaagggaggaagaaagagagggagggagggaggaaggaaagaaggataaaaggaaggaaggatggggactgcaggaggaaggaaggagggagggagggaaggaggaaggaaggaacgaaggaaggaaggaaggagagtgagggaggaaaggaggagagtgaggaaggaagaaaggagggagggaggcaggaaggaaggagagtgagggaggaaagaaggagagtgaggaaggaaggaagaaagggagggagggaggcaggaaggaaggaaggagagtgagggaggaaagaaggagagtgagataggaagaaacgagggagggaggaatggagggaggaaggaagggagggagggagaaaccttgagaggacaggagccgatcacgtctgtaggaggtagctgagggctgcatgtaacaccgtctggaatgatgggatgcagaatgcagctaaaagggtagtccagtcattctggaaaaatcaaaaccatggagacagcaaaagatcagtggcttccaggggaccagtgggtgagagggagggatgaatgggtggggcacagagggtttttaagacagtgtaactatgttgtgtgatactgtcatggtagatacaggacattgtgcatttgtcaaaacccagagaatgtacagccccaagagtgaactctaatgtaactgtggatttcagtcaatgacaatgtgtcaacactggttcatcagttgtaacagattaatggtaaaaaaaaaaaaaaatcccagttgctaattataggggaaattgtgtgcaggcggagagagggtatatggagattctctgcagtatctatctgctctatgttctgtaaatctgaaactgctcttaaaataaagtctattaattttaaaaagtaaaacaaaaccaaacccatggtggatgtgggactaggatagcagcgaggaggatttagagcttctgggcattgattcaccagcagaacatccagtgggttcctctgtaggtaaaacagagagagagaaaggtaggaagagaaagagagagatggggatagagagagaggcaggggaagagagagagagagagagagagagaggaggcgagggagaaacagagagagagaggtggggagagaaagaaagagaggtggggagagagaaagagagagacagagaggtggagacacagagagatgtggggaaagagcacacacagagagagagagagatggagggagagagagaagtggggagatagagagtgggaggtggggggagagagagagagaaggacagggagaaagacacagagagaggtggggagagagaagtggggagagagacacagagagtgtgggaggtggggagagagagggttggggaaagagagagagagacagagagaagggtggggagagagagagaagtggagagagagggaggtgggaagagaaacagagagaggaaagagaggtagggagaaagagaggacagaggggaaagagaagaaaaaggtgagaagaaagagagagagcaagcaagcccactgtctagcactgacaggaacacccggtggggccagttctccactcagagactctagggctaagcgtggctgtggacaagtcctgccacagacatccctagagcagggtttcctgccttcagcattagggacgctaggggcgaatcattctctctcagaggggtgtcctgtgcactgcaggagactgagcagcattcttggtctccacccaccagatagataccagcagcactccccagtcacgacaatcagaaatgtccttatacgttgtcacgtgtctcctgggtgacagcatcactccatgggccaggcctgtcttgtctctgagaccccatctggccttaactctcacccatcctggctctctcttcttagtgaagctgtctggcctcccctctcttccacttaagccaccacttccctctcttttctctccatcttctcatccccagctcctaaccattccctcaccacctgctcccattgacgcctcccttgtgtgtgtgtgtgtgtgtgtgtgtgtgtgtgtgtgagagagagagagagagagagagagagagagagagagagagagagagagagagacagggtatccctctgtcacccaggctggagtgcagaggcacaatcacagctcactgcagccttaacttcctgggctcaagcaatcctcccacctcaatctctggagtagctacaggtgcctgccattcctggccaatttttgtatttttttgtacagacagggtctcactatgctgcccaggctggcctcaaactcttggactcaagtgatcctcccaccttggcctcccaaagtgctgggattgcaggcatgagccactgcacccggcccaccctgattctttacaccctggggtggtggctggagcttctgaaccctgaatcctctttctctcttttctccgcctcttcccaatcctttttccgtagacttcttgcctggacagaccgagaagagaggttaaaatcaaaccatcaccttgggtcacattgagcattggctgtcttctctctgcacctgttacctcccccatccaagggacctacctcatgaggcagcaggagctctaaagaaggcaagtcctggctgggcacgatggctcatgcctgtaatcccagtactttgggaagccgaggcgggtggatcacgagatcaggagttcaagaccagcctgtccagcatggtgaaacccctgtctctactaaaaatacaaaaaattagccaggcatggtggcacgcacctgtagtcccagctactcaggaggctgagggagaagaatcgcttgaacctggcaggcggaggttgcagtgagccgagattgcgccactgcactccagcctgggctacagagcgagattccgtctcaaaaaaaaaaaaaaaaaaatagaagaaggtaagtcctgctaagcaaacagcacactgactaagacgtggtgagtggcctctgcctgtcacccactgccctgtagactcacattgctaaaggagtaatataaacaggtggtttcttggagtccctggcaggtgctggttccccaggtctctcctggtcaggtggctgagaggggaggtgactcacctgggactccaggcatctgcttctgcttcatcccagtaggaggctctagtttggagtttctccacaggtgggagctgaccaggtgtgggctgcaccaagcagccacaccagctgagccgggggcttgactgagcccaaatgcgattatttatccctccctgactccctgcccaccggcttccctcgctgtggtcctactgtctctgtctccgctacagggatgctgggaccccagggaccctgccagagaggaggcaacctcagggaatctgtatcctcactttcccattccccccgcctgccaggggtgagtcaattccctgagcttgtcaagagcttgagcagagtctagtgctctacagatttggggtttgggcccatgactgttgaaattgacaggagggcagccctgccattgcccccagggactgcagaggctgccttgatatgccccgtcaccttcattcttctccaactgggtcatttgcccaactaaatgtcctttaaaataattttttaaaaccaacacacacacacgtatttgtttttatttttattttttgagacagggtctagctctgttgcccaggctggagtgcagtggtgtgattatggctcactgcagcctcaacctcccaggctcaaatgattctcctgcctcagcctcctgagcagctgggagtaaaggtgcttgccaccacacctgggctaagttttaatttttctgtagagatggggtctcgctttgttgcccaggctggtcttgagctccttggctcaagggatcctcccaccttgacctctcaaagtgctgggattacagctgtgagccaccatgcctggcctgtttcttcttattatgtaattgaaatgctacatacaaagcagcaaaccatgcaatggccagccaggcaatcgtgacggtgaatttaatgggtatcccttcagatcttcatgagcatgtaggatgtgaaaacaatgcaaacccataaaatcagagttctgttgtgcattattgttgctttcgcttcgttctgcttttgaggtgaaattcacataaaataatcaaccactttaaagtatacaattccctgggattgaatgcattcacaatgttgtgtggccgccgcctctgtctagttccaaaatgttttcatcacctaatacccattagcagccactcccctaccccacccagtccttcaaaaccaccaatttgttttctggctctggctctatggacttacctattctagacatttcatataaatgggactatatactactatatataacgatgcattatgattgcccctgtgagtagccacggcactccagccattttgtcaacacaaaaatgtcgacattgccaagactgagaaactttggtctgcataaactcacacagagttcactctaagacgctgagtgaaaaaccaagttacggaaagatatctacgggagaatcagatctgcattttaaaaacacacaaaatggtttgacagtttatcaaaaagttaacatagaaattatcaaaggactcagcaatttcactcctaggtatacacccaaaagaatggaaaaggattcaaacaaatccttggacatcaaatgtgcatagcagcactgttcacagtagccaaacggtattttttaatttttctgtagagagtaggatttcactttgtttctcaggctgctcttggaactcctgggcttaagcgattctcctgccttgacctcccaaagtgcttggattgcaggtgtgagccactggacatggcctgatccaaacgtctatcaatggcagatccaaatgtctattaataaataaatggataaacaaagtgtggtataatcatataatggctattattcagccacagaaaggaataacatcccagtccaggccacagtagagatgaacgttgaaaacatgtgctatgtgaaaggagctaggcttttaattttatggataattccatacaaatgatatctctttgatacactgatttcttttctttggagtatatacttaagtagtggcatttctggatcatatgatagctctatgtttagttttctgagaaaccgccatactattatccatagtggttgtattaatttactttcccaccaaaaaatcatgagggttcccttttctcagcatcctcccaggcattccttattgcctgtcttctggataaatgccatcttaactgggttgagacattatcttgtagtgttgatttgcatttctctcatgatcagtgaggttgagcatcttttaatatgcctgtttgccatgtgtatgtcttcttttcagaaatgtttattcagatctttggcccattttaaaatcagatcattaatttttttcctattgagttgtttgagccccttatgtatcctggttattaatcccctatcagatggatagtttgcaagtattttctcccattctgtgattgtctcttcactttgtttattttttatttacttttatttttttttattttttatttttgagatggagtctcgctctgtcgaccaggctggagcacagtggctcaatcttggctcaatgcaacctccacctcccgggttccagcaattctcctgcctcagcctcctgagtagctgggattatgggcacacgccaccatgcccagctagttttctgtatttttagtagaaatggagtttcaccatgttggccaggctggtctcgaacccctgacctcaggtgatcagcccacctcggccttccagagtgctgggattacaggcgtgagccaccacgcccagcccactttgtttattgtttcctttgctgtgcaggttgtaacgtgatgtgatcccagttacccatttttgctctcgttgtctatgcccgtagtcaagaaatttttgcccagaccaatgtcctggagagtttccctaatgttttattttagtagtttcatagtttggggtcttagatttaagtctttaatccattttgactttatttttttatgtggtgagagataggggtctagtttcattcttctgtacatggatatctggttttcccaggaccatttactgaagacagtgtcatttccccagtgtatgttcttggcatctttgtcttggaggaatttagatacactggagggacccgcagaaataagatatggcagcacgtatacaaattaaagccttaaaatttttggagagatttttcaaaatttggaatgatataaatataatgaagaactttgaacttagccatttctaacttatctgttccaggagcacataaacagactaatcgggattataaaacatgctcacactaagtaactaatatgcagacatttatggagcgacaactgtgtgcctggcaccaaggtacaaagataaatgaagctggaaaccttctcctgtggagtacacagtggcaggaaagacacaaatattaaagttaaaattatgtcacggtggcagggcacggtggctcacgcctgtaatcccagcactttgggaggccgaggcggatggatcatgaggtccggagttcgagaccagcctggccaacatggtgaaaccccgtttctactaaaaatacaaaaattagctgggcgcggtggcaggcacctgtaatcccagctacctgggaggctgaggcaggagaatcgcttgaacccaggaggcagaggttgcagtgagccaagatcgcaccactgcactctagcctgggtgatagagttagacttcatctcaaaaaaaaaaaaaatatgtcatggtgtgatcgatgttgagctagcaaggaggggtggcaggaccaggaaaagtccatcaaaattggtgatgggagtcataaggatgagtagacttcagccagtcagaagatcagagaaaaggtgctacaagtagacagaacagagtcttgaagatggcttcagagggatatggtggaacgagcctgaatgcagtctagtaagccagggacatgaggcaaggagaggacaaagatggaagagggtctggagaggtggccaaggacagcttaaggagacttggagggtggtcgaaggagctgtggcttcctcttgatgtctggagagtcaccagagggtttaaatccttgtaatcccagcactttgggaggccgaggcaggaggatcacttgaggccaggagttcaagaccagtctgggaaacataatgagacccccccatctctaccaacaattatttacaaattaaaaataaataaataaatcctatgagtgacatgttcagccacctgagggaggatgggatcgggggaggtgatgactgaacagcttcaaccaactcagaacagccagttgtcaacttctgaaaattgttgcaacctggttgttaaacacagctctgattaaaagtaaactgtatgaaattacagtgaaataaattaagggaatctaggagtgagctctgtcttctcacttctgtcatgattgaaaggttcatctatgactcttagcgttattttcagcacctaccaattgatggcaggtcttctgtaaatacagattataaggagattgattcttctatctgaaagtctcagaagttcttagagacaaataattttcttaaagattaagcaggtgagaaagtaatgaactctagaagcttaaagctgtaataactgcttaaaatgtatcacttcttaattatttcatatatattttaccattgtctgtgcttttgagtttatgactattgcacgtgtactgtggaaatactccatatactagtagcacatcagcaggcttcaacctttttggcaccagggaccagtttcatggaagataatttttccacggactggggttgggggatggttttgggatgattcaggcacatgacatttattgttgtgcactttatttctattattattacattgtaatatataatgaggtaattatacaactcaccatcatgtagaatcagtggaagccctgagcttgttttcctgcaactggactgtcccatctgagggtgatgggagacagtaatagatcatcaggcatgagattcccataaagagcacccaacccagattcctcgtgtgcacagttcacaatagggttcacgctcctataggaatctaataccagcatgccaccattgacccatctgacaggaggcggagctcaagtggtaatgctcaccccaccccaccccttccgccactctcctgctgtgtggcccagatctaacagccacagaccgctaccagctgggcgttttggggaacccctgtcttatgggacacaacaaaaccagtgctgaagaagaaaaataaccttggcgtcttcttcagttgtgagactattgtgaccgtgtctgtgggtgactgagctcttatgtagctgcagggattggagtaactgaggtcactcacactcatgacctgggttctgccactgcttcctccaccatctcacatcacagccgcttgggatctctgttgactcttcgaaagcatgggtggatgtggattcacaaagacattttccagccagaaggctcagagaggggacttaaactggaaaacttaggcctagaaatggccacaagactggcactgaaacggtatgccagtgctcaaggattaggatgcccccaaggaggtatcacttggggaaaaccgttgatgattatctctatggaattacagaaatgccaaatatataacccaagaaacttggtgtgcactcaatgacacagcatgggagggagacctcttacttctatccagatgtttgtgatgtatgggtatctttggccaccgggtgctcctaccatcaaaaagagcttcaagacaggcttgttggggccttgagtccttttaccctagtctttcagctcttgctaagaagaatcccagctaagtgtggtggctcacatctctaaacccagcactttgggaggccaaggcaggcggatcacttgaggccaggagtttgagaccagcctggccaacatggtgaaacaccgtctctaccataaatacaaaaaatagccggccgtggtgacacgcgcttgtaatcccagctatttgggaggctgaggaaggagaatcacttgaacctgggaggcaaaggctgcagtgagctgagatcgtgccactgcactccagcctggatgacaagagtgagaccttgccacacacacacacacacacacacacacacaaaactgaaatgattgtaggtgctcccacagtgcctacacacattgggtttctctccagaatgagatcttccatgtattcgaaatgaactgggagagtcaaaggttttcctacccaccttgcatttgtaaggtccatctccactatgcattttcacatctttgaaggtttgggggggaagtgaatgttttctgaaattcctaacattcatagaggttttctccactgtgaggcctttcgtgtatgtgaaaggagtggtgaaaacgaaaggcattcccacatggcttacatgtatatgccttctgtctacattcctgatattcacagggtttgcgtccaaggcgatctctgatgtgcctttcagtggatggatagcccacgccgacctctccacacacatggctttcaggtggctttactccaggaggcgttttcttattcagattatgacctggaatctggctgaaggcttctccacattgactaccttctttattttcacagggtctctctaccatatgatttctgtacaaaataagtacattattaagtatttttataaataatttatttgttattgatgggtattggatttatgtggagttttttggagacagggtctcactcactctgttgccaggctggagtgcagtggtgcgatctcagctcactgcaacctccgcctcccaggttcaagcgattctcctgcctcagcctcctaagtagctgggattacaggcacccgccaccacacctggctaatttttgtatttttagtagattcggggtttcaccatgttggccaggctggtctcaaactcctgacctcaagtgatccacctgcctcaacctcctggatttatgtttttaacatcatcagtggaagcataggtaggatttctaacctgtttccactgtttggccatgaatggattgaatggtctgcaggagcgcccaactacagctgctatgaaaatagaaatattaacatggggtttcttcttcttttttttttaagacagggtctagctctgtcacccaggctggagtgcaatggcacaatcttggctcactgcaacctctacctcccaggctcaagcaatcctcccacctcagcctcccaagtaagggggacttataggtgtgtgctggcacacctagctaatttttttttttttttggtagagaatagatctccttatgttgcccaggctggtctcaagctcctgacctcaagcaatccacccttcttggcttcccaaagtgctgggattataggtgtgagccactgcacctagcctatatgtggtttcataatagtgtttccatgtaaactttttttgcaaacatatatatgtctcatttaagtatatatttatagagaaagttttctaagaataaacagattgaaactgggcttgtttttagaatttcctgacagtctacgattctcttgatggacactgctttctcttgaaaattaccttaaatttctcccaggattttggtacagatcttcaatgttcttatctccccatttctttcctaaaatgcaggtagagaaaaatcattatgaattattacaaaattattttaaaattattgaattctaggttcatggtacaccatgaccatggtacactggactgcaatggcacaatcttggctcactgccacttctacctcccaggctcaagcaatcctcccacctcagcctcccaagttagggggggctacaagtgtgtgccagcacaccagctaatttttttgcctatatatttatcaaagtatttcttttctacattccaaatcattgagcagctcaattgatgagtaagaaagacttgttctctaaatgactaagaaaagaaatgttgtcacccttaactacagaggccagcatcctgatggtttcccgcatcacatctctgtagagtttcgtctgggaaggacccagcaaagcccactcctgtagggtgaagttgaaagccacatcctcaaaggctggagtcctgaagcatccacatgtgtagaaaaggatggtgagactgacagccctgggtatctgtacttaccacataataagttcacatgattccatgttctccaaacatttcttctatgacttggttatcacacctcttacgctgtgtatacttacttcctctcacatagcaattccgatgctagaattatttggtaaagcaaccatgaaacacaaatacagctctccttggtgggtccagggagtaggatgtactgcctgggtcaccctaatttctcttcacacagtgggtctatagcacctgtcataaaagtcctcctaccacctagtgtgcagaagagacttaacattaggagtcctgaaactctgtatccttagaaatgtttgttcacaaagtttgatctttgataacatatgggatatgaaatttggatgggataccatgaacccaactgataaaagagtcgtataatttcctaaaactgaaaccaataagcaaaaacctctttggaagcagtaaaatttaggaaaacctaaattttaattgacgaattgctggagatagtgtggacaatttgagagttaaaaatgccaggaggcccagacctaaggggtccccactaattagtgacatgcacctccagaaatcctaccagctcttccagtgaagatgagagaaaaactgcttcctgcttttggcagaagatgtgaaagattagccattttgaaatatgcccagagaatgctattcttcttaacatctcctgccttcaaaagaaactatttcccaaagcctaccaactgggatgctggcagagctgacctcctgaagcaagagaaatacccaattccacccacttcaatctccctgccacaactagggaagggtgagaatgagaagtacttaagaaagctacaacccagaaacacaggattccaaaaaatgaggccaaagcataggtcaatggaatgcttccccacaccccacaccttactgccacttcaagagggcttctgtattacaacagcagaaaacaagtgagacagctgcatgccttatgccacatttacgaagtcactacgggcacacatacaagctgaacaacattgatgaagttggcatatttctagaaacacacaacataggactaagtcataaagaaagaaaaaattgggccaggcgcagtggctcatgcctgtaatcccagcacttcgggaggctgaggcaggcggatcacaagtcaggacatcgagactatcctggctaacacggtgaaaccccgtctctactaaaaatacaaaaaaattagctgggcgtggtgtcgggcgcctgtagtcccagctactcgggaggctgaggcaggagaatggcatgaaccctggaggcggagcttgcagtgagccaagatcgcaccactgcactccagcctgggagacagagcaagactccgtctcaaaaaaaagaaagaaaaaattggagcagatctacaactaataaggagattgatgcagtaatcaaaacccctcaactcacaaaagcccagcaccatacagtttcagcgatgaaacagaccaaacacttcaggaagattaacaccaattctcctcaaactcttccaaaaactttaggaggtaggaacatatcctagtttattccttgaggccctgaaattgtgctgacaataaagacaatgatacaatatttgatttgcaaatatcccttatgattattgacgcaacaatcctcaaataaatactccaaggtacaggaatcaaaacagtgtggtactggcctaaagacagagatatacatcactggaatagatacaggggccaagaaagatacccatatatatatggtaaagtgatttttgacaagaatgcttagataatgcaatggaaaaaggctgctctattttaaaaaatggtgctgggaaaactggatagccacatgtgaaaaaataaagttggacccataatttatataacatagaaaaatgaaataaaaatggattaaagacttaaagggaccagctcaaaccaaacaactcttagaagaaagtgttaaacaaaacttatgagaggccactgttttggactgagctcctgcactaggccccagcagaccagaacaaaccaaaatggagtcactcaggctaagtaccacataatcaaactgaacctttaaggaaggaggcaaatcctcaaatgcaccagtttttcctgagagcaggagagtcacagcaaccaataaaaaaaacaaaaataaaacccagccaacctgagctggcataatatataataaggccgcttacaaaaaaggaacctaatgattttttaaattgttctgttttgttgttcctcttacaagaatcacctattccattatacaaagcaggagttcttattctattttatagaatgggatgcttcttcggttcaggaattgcgaataaaagctaagtagatctttaaatttgttttaattttttttaaacctaaggcaaatgtttaacccacccttagccaaaatacaaggccttctttatttccctccgaagaagaggcagaccttaggataaagctttcttctggtctctgtcatctccctgccaaccaccaccaccaccaccatcaccttctctctaatcttgtttgctcctccctgtgaaagaatcattcctaacctttgaggtgttttttctttttctttcttttttttttttttttttttttttttgagactgagtcttgctctatcgcccaggctggaggcagtgacgtcgtgatctcaggtcactccaacctctgcccgccctgggattcaagcaattctcctgcctcagcctcctgagtagctgggattacaggtttctgccaccacgcccagctaatttttgtatttttagtagagacagagttttgccatgttactcaggctggtcttgaactcctgacttcaagtgatctacccgtcttggcctcccaaagagctgggattacaggcgtgagccaccacgcccagctgagatgctttttcaagagtcgccttaacatgaagtcactgtgtgagggtttcggctctcgagtcaagataattcacttacttttaaaagaaaatactcagcgtttgaagaaaccaacaaaatccctcaaactcagtgtccatatagataggcagggaagacaaattgtaaggcgcttgtattttatatagctcaacaagagaagcacaagtatctatccctttcagacaacaaagatgtgccatttaattattatttccatgacaatacacagttgaataaatcattatatttgaatgcttcttggtgttgccaagtcctgacccacagggttttgtattaatctctgaagtccaggtaccaggaaagagaagagttattcaccgtcacaagttctcactctggaaaggagaaaaatggatgttttaatgaatctttgtaatttaccaatttaactatgacactttattgtggaaatgtattcatttcgctgcagccataatggaagagtgattttccttactttgctgagattctcagccccagtagccttctcaaggctaagccctggaattccatttgaaatcacccaaaagaaaagaacaaatatgagaaatgtatcacacgccatctgggtaagacaaaatgtaaattaaaagctttatcggatgatgggtggctcatgcctgtaatccgagcactttgggaggccagccggtggatcatttgaggtcagaagttcgagaccagcctggcaaacatggtgaaacaccatctctactaaaaatacaaaaattagccaggtgtggtggcaggtgcctgtaatcccagctactccggaggctgaggcaggagaatcacttgaacctgggaggcggaggttgcagtgagccgagatggcaccactgtactccaggctgggcaacagatcaagactctgtctcaaaaaaaaaaaaaattaatggatgaaatataaggctagacatttcttttcttttttcttttttttctgaaatacacctctttcttgcctccttggatatattctatcttgtctatcaaactctactaataaaatccatttgatatttaattttttaaaaactgaggttcaggctgggtgcagtggctcacacctgtaatcccagcactttgggagtttgaggcaggaagatcgcttgagcccgggagtttgaggtcagcctaggcaatgtagtgagaccctgactctattataagtaagtaagtgaaaaaaaaattttcaaggtgacaaacccagggaggggtagggcaaactggaataccggcaagtctgactcaagtgtcagatcaggtcatcctatataacctcagacatgccccaaaccctgtgctgctcacatatatactcagtgaccaccctcccagaagacactgcattgtgtgcgtttcagctttttgcgtcacctcagtgaaggtggttttcctgtccttagccatagttttctcccttcactaggctaagaggattcaaaggacagggatcattccagtcttttcccttcaatagcagcatctgagtggctgaccagagaggtatttccaagaagtgaaaactgggcttggggtgagaaaagctaaatgtcctaaggggtttccttttagatgacggagggagataccaggggactcctccctcccgggaggtagggggagggggtgcacccggcggctcccctgagaggccccacaggcacatctcaggctgtcctctgggaagaaatgacccaggagctgatattcatgaccctccaagagacccggcagcttgtgggcatctcagatgagccccaggcagttctgaaacccaggaccaggaaaagataagagggtgggctgaggtcacatcaccctgtaacgtttccaaaagggaactgtcaggcctctgagccgaagctcagccattgtaacccctgtgacctgcacatatatgtccaggtggcctacaggagccaagaagtctggagcagctgaaaaacaaggaagtgaaacagccaattcctgccttaactaattaacccaccttacgacattccaccattatgacgtgttcctgccctgccccaactgatcaatcgaccctgtgacattcttctggacaatgagtcccatcatctctccaccatgcaccttgtgactccctcctctgctgacaacagataaccacctttaactgtaactttccacagcctaccccagccctataaagctgcccctctcctatctcccttcgctgactctcttttcagactcagcccacttgcacccaagtgaattaacagccttgttgctcacacaaagcctgtttaggtggtcttctatacggacatgcttgacacttggtgccaaaatctgggccagggggactccttcgtgagaccggccccctgtcctggccctcattccgtgaagagatccacctgcgacctcgggtcctcagaccagcccaaggaacatctcaccaatttcaaatcgggtaagtggtctcttcactcttttctccagcctctgtcgctaccctccaatctccctgtccagtctttttcttctctagtagagacaaaggagacacattttatccgtggacccaaaactctggcgctggtcacagactcaggaagacagtcttcccttggtgtctaatcactgcggggacgcctgcctaattattcacccacattccactggtgtctgatcaccttggggatgcctgccttggtcattcacccacattcccatggtggcaagtcatttgcggggacgcctgctttggctgctcacccccgcccttctccgtgtctctacttctctctttaaacttacctccttcactttgggcaatcttccgccctccattcctccctcttcccccttagcctgtgtacttaaaaacttctcttaaactaacacctgatataaaactcaaacgtcttattttcttctgcaatactgcttggccgcaatataaacttgacaatggttccaagtggccagaaaacggcacttttgatttctccatcctacaagacctagatcatttttgtcaaaaaatgggcacatggtctgaggtgccttgcgtccaggcattttttacacttcgctccctcccaagcctctgctcccaatgtgactcatcccaaatttttcttctttctctcccgtccgttccttcagtctctaccccaacctcagagtcccctgaatcccccttttctgcagacccctctgacctctctccccctccccaggccactccttggcaggctgaatcaagtcccaattcttcctcagcctccgctcccccatcttataattcttctatcacctcccctcctcaaacttggtcaggcttagtttcattccatgactagctctcccccacctgcccaacaatttcctcatagagaggtggctggagctgagggcacagtaaaggttcatatacctttttctctatcagacctttcccaatcagtcagcgtctgggctctttctcatcagaccccactaaatatacacaggaattccaatatttgactcagtcctacactttaacctgcagtgacctaaatgtcatcctgacctctaccctctccccagatgagcaggaaagagtttataccctagcccaatctcacgctaacacccgccggcatcatgagccagacctccaagaaggcatcagggcagttccctgagaggatccttgatgggaataccagacaggctccccaggtatagctaggcgagattacatggtctcttgcctagctgaagggctgaaaaaggcagcatacaaagctgttaattatgacaagctttaagaagccacccaaggtaaagatgaaaatccagcccagttcatggcccgtttggtggctacccttagaaactttacagccctagaccctgaagggccagaaggccatcttattctcaatatgcattttatcactcagtcagctcctgacattacaaaaaaagcttcaaaaattggaatctggccctcaaaccccacaacaggaattaatcaatctcgccttcaaggtgttcaacaatagagaagaggcagccaagcagcaacgtctttcagagctgcaattgcttgcctctgctgtaagacaaaccccagccatgccttcagcacacaaaaacttcagagcaaccaaaccacagcctctaggcactcctttaaaaccatctcatggaccttgcttcaagtgccgcaaaactggccactgggccaaggaatgcctgcagcccgggattcctcctaagcctgtcccacctgtgcgggaccccactggaaatcggactgtccaactaatatcacagccccttctagggtccctggagctctggctcaaagctctctggctgactccttcccagatctcctcggcttagtggctgaagactgatgctgcccgatcgcctcagaagccccttggaccatcacagatgccgagcttcgggtaactcttacggtggagggtaagtccatcccctttttaatcaatacgggggctacccaccccacattaccttcttttcaagggcctgtttcctttgcccccgtaactgccgtgggtattgacggccaagcttctaaaccccttaaaactccccaactctggtgccaacttggacaacattcttttatgcactcctttttagttaaccccacctgcccagttcccttattaggctgagatattttaaccacattatctgcttccctgactattgctgggctacagccacaccccattgctgtccttttccccaattcaaggcctctttcgcatcctccccttgtatctccccaccttaatcctcaagtataggatacttctactctttctttggcaactgaccatgcactccttaccattccattaaaacctaatcacccttaccctgctcaataccagtatcccagcccgcagcaggctttaaagggaactgaagcctgttatcacttgcctgttacaacgtggccttttgaagcctacaaattctccttacaactcccctatcctacccatccagaaaccggacaagtcctagaggctagttcaagaccttcacctcataaatcagattgtccttcccatccatcctgttgtgccaaaccctatactctcctctcctcgacacccccttccacaactcattattctgttatccacctcaaagatgccttctttaccatccccttgcatccctcctcccaacctcttttcacctttacttggactgaccctgacacccaccagtcccagcaattcacctggattgtccgaccccaaagtttcagggacagcccacactactttggtcaggccctctctcatgactttctttctgcccatctgcctcccaccttattcaatatgttgaagaccttcttctttgcagcccttcttaccaatcttcccagcaggacactatcctatcctacttcttcaatatctctactcaaaggggtactgagtatccccctctaaagctcatatttcctcccctagtgttacatatctcgacatagtcctccatcaacatacacgcactcttcctgcagactgtgttcagttaatctcccagaccctattccccaccaccaaacaacaactcctttccttcttaggcgttgttggatacttccgactctgggtaccaaggttttgccattctaaccaaactgctttacaaactcactaaaggtaatttagctgatcccatagaccataagtcctttccccatgcttcctttcattctctcaaaaaggccctagaaacagctcccacactagcactccctgacttgtcccaacctttttccttacacacagctgaaacacaaggctgtgctgctggagttctcacacaggagccaggcccacgacctatagcctttctatccaaacaacttgacctcacaattctaggctggccctcatgtctacatgtggtggcagctgccgctttaacacttccagagtctctcaaaatcacaggctatgctccacttaccctctacagttctcacaaccttcaagcattaatatcctcctcacacctttcacacttgctgtctgcccctcgacatctccagctctattcactctttattgaaaccccaacaataactactgcccatgggcccgatttcaacccagcttctcacttagcacccaacacaagtcctggccaacatgattgtatctccctaatacacatagcatcttccccctttcctcatatttctatttttccaatcccaaatccagaccacacttggtttattcatggcagttcctctaaacccagtcaaatctcgccagctaaagctggttatgctgtcgtgtcccatacctctattattgaggctgctgcacttcctccctccactacttcccaacaagccaaactgattgctttaacttgtgcactctctgtcgccaaaggaatgcacattaaaatttatattgactcctaatatgctttccacatcctccacaaccatgctaccctttggactgaaagaggttttctcaccacacaaggctcttccattatcaatacctctctaataaaggccctccttaatgctgctctcttgctggccaaagctgggttcattcattgtaaaggacaccagaaaccaactgatcttattgctaaaggaaatgcctacgccaacaggacagcaaaagaaacagcaaatgcctccacgcctgcaaatattctagccctcaccccaaaaggctagtacttttctttcttctctatcacccccacctactcctcttctaaaaaacctgctctaccagtcttttccaactcagggcaagtggttcttagatcatggaaaattcgttcttcctgcctcacaagcccagtctactctctcttcccttcatgaccatttccatataggatataagcctctggctggcctcctacagcccctcatttccatcccatcatggaaatccatccttaaaaccatcacctctcaatgctctgtctgccatgccaccaacccccgaggtcttctcaggcctcctccttttcctacgcatcaggctcatggatttcctccgacacaagattggcaaattgactttattcatatgccgcgtgtctgtaaatttaaatatctcctggtttgggccaataccttcaccggatgggtcgaggcctttcccactagctctgaaaggctactacagtcatttcttcccttctgacagatataatcccccaatttggcctccctacttccacagtttctcaggctcttggtattcagtggaaacttcataccccctaccgtcctcaatcttcaggaaaggtagaacggatgaatggtcttttaaaaacacacctcaccaagctcagcctccaacttaaaaaggactggacagtacttttaccacttgccctcctcagaattagggcctgtccttgagaagccacagggtacaacccatttcaattttatatggatgcaccttcttactcagccacaatcttgttccagacaccagccccctgggcaactatcttccagtcctctagcaggctagacaggaaatttgccaagctgctaatcttctcttgcctactccagattcccagccatatgaagacaccctagctggacgatcagtccttgtcaaaagtctgacccctcaaactctacagcctcaatggaccagaccctacccggtcatttatagcacaccaactgccgtccatctgcaggaccctctccattgggttcaccattccagaataaagccatgcccatcagacagccagcttgatctctcctcttcctcctggaagccacaagattaggccgagagccgatcagacaaacaacctacaacccttaagctcctggcagcgcccagccaaggccatgcttccttgcaacactccttccaaatggccatcccagcatgcttccaagcaggcttcatccgttcctctggaccctcatctcttaagacctgccgcctataaaaaggattatatcttgagaccctatcctctaaaattttttccacacccaaaacaaaaaatctctgggtcaaaagtctaaaacgcttaggctggcaaccatcagatccttgcccatggtgtcctcaagcctactctcatgaaatggacaacagtacacgcatatggggccagttccacatatttggcaaccagaccagcatccaggacaacacaaagtatgttgtttgttgttagagggcttgggacatttcactctttgccagcctcagcttaatccaggagacaaagattattttccttattatctcttctgcataggatctgcaatcagaactattgaacttctccattcagaccgccactcacacctatgggaaaagggtaatgtatcatcggcttagcaacagggaatactattcgtatgatggaaaatggggacaaaaggctttggtacataaaacattattccttccttggcctaaaaactcatcgccacctacattaaagctaatatgcctgattactgtttttagagaacttattttattagggcagttccaagctcaaaaatacgctaactggcaccttgttagctacataaaaatgcaccctagacccgaaacttactagactcattataaaattttctttaaggtgtccacgcagtccctggtcacacttgaagcagtccggagaaatatcagccctaccccagtaatccccagaaggaacttacacttttttttaatcttttcctacaacttcatattttataaataaaaagacaaaaatgtcaggcctgtgagctgaagcttagccattgtaacccctgtgacctgcacatatccgtccaggtggcctgcaggagccaagaagtctggagcagccgaaaaaccacaaagaagtgaaacagccagttcctgccttaactaattaacccaccttacgacattccaccattatgacttgtccaccattatgacttgttcctgccctgccccaactgatcaatcaaccctgtgacattcttctcctggacaatgagtcccatcatctctccaccatgcaccttgtgaccccctcctctgctgaggataaccacctttaactgtaactttccacgcctacccaagccctataaagctgcccctctcctatctcccttcactgactctcttttcggactcagcccacttgcacccaagtgaattaacagccttgttgctcacacaaagcctgattgggtgtcttctatacggacacgcgtgacaggaacctcaacccaaaggcagtctgatgaggtgtctaagataaaagtagcggcacaaaggcttttgtaaacagaggcgtttcatgtggttttcctttcctttccttatatgtgaaaaggtgacagaaaagaaatcttcctaaaagagtcagccactgctctgtggaacgatgatcatttaaatgccacgtcgatttgaaacgtacaacaaagggactaacagttgagaaccatgtggattgcagtggagacgctggcgttagagaatgcggggagggaaacgttcattacaagatttacggccagcccaagggggagcgaggctgggggaccgggtcgcggagacccggcttcgcacaccttttggaagactcagggagaagcgggggccgccttcggggggaaaggcgggactggggagcccacaggccatggctcctcccacaggatccccaggccggaggcgggatccccccatgatcctcccgtggcccccgcacaatctggggagatgcggagctgcccagagagggctctggggcgacagtcactgcgcagggacaggacaggactcccggagtcccagctgccggcccagccccaccctgcggccgagaggaccgagggccgagctgctccaggggaactcgggtcccagaccccggagtcgcagcggacaggcccgggtcccgccacagccagatccggctggttccaccagctcctcctccggtctcgggacgtccggccccgcacactcagcatttccggcttccgggtgtcccggcgtcctcccctgggcctgctcacgtcgcagaggggcggcgacggggattagaggggaggagggcctgcgcgagcagcaaagaccccaaaccccaaaaaacaaagaaaccgccagaaactgaagcttccacagcccgccacgtcccccggctacggctacgctcctgattggatagttagtacggcccctagtgcccctgattggataccgcttcaggtcccgccccctggggttagaaagacaggagacccgagaagacacttggctgcgtggagcccaaatgggcggttcctggcaactgggcttgttgtcttcctcgtgtcaggatgtaaaaagaaaagtagaggttcttcttcaaagacttccttcttcatctaattaagaataaatagtgtttgaaatgcttggtttttggtgccataaagaaatagcactttaacattaatttatttagcaaggccatttttactccctgcagaaagggtacactcgccagcagttttgccacgagcgtacaccgagcaaaggagacagggtcatttataacctgaggtgtccaccctactgctgtgtccagtttccattggctggaacgggacctcacattctgtgtttgtcctgattggctagcaacttagaacgttttaaaagaggcaaaggtggaggagaacaaaggaagaaggaagtaacttgtggaatgctgagaaaggtaaaaacaccttcaaataaggaagaggaagaggctatgacttaatgcttgcttggaccagtataagcataccagggcaaatatttgggctaaattgtgggagctaagaacataaagtatattgatttctttattatggctagcagatatttaagaatgttagcacaggtctttgaataaattttgcttttaagagaagttactatttattcctaatcgaatgggaaggaaaatttttgaagaggaacctctactttactttttacaaacaataacttgttttagaagcaacatttatttaaagacttgtactaatattcttaaatatttgctagctgtaataaagaaatcaatgtactttatgttcctagcttttacattttagcttaaatatttgctttggcatgcttatactagtctaaccaagtattaggtcgtagcttgttctttatttgaaggtgtttttacttttcttagcgttctacaagttacttctttcttttgttttcttctgcttttgcctttttaaaaaaagttctaagttgctagctgattgggataaatacagagtgtgaggtcttgttccagctaatggtaactggacacagcagtagggtagacgcgtcaagttgtaaatgaccttgtctcttttgttcagtgtactctcgtggcaaaaactgctagcaagtgtatcttttctgcggaaagtaagaaactggccttgctgaagaaattaaattcatgttcaagtgctattctttacagcgcccgagaacaagcatttcaaacaaggacctctggggattgggggtgggggtggggtgacatttgcaagtggacactggcattcatcagtactcactgggcccttcctctttcttcctcctggactaggggaaattccacacagtgttgtccatcaagaaaaatgcccagacaaggctcaatcattttaggaggtttatttgccaaagttaaggacatgcacccctgacacagcctcaggaagttctgacatgtgcccaaggtggtcagggaacagtttggttttatacattttagggagacatgagacatcagtcaatatatataaggagtatttggttctatccagaaagatggggacaattcgaagcagggagagggcttccaggtcacggagagacaagtggttgccttctcctgagtttccaatatgcctttccaaaggaggcaatcagaatatgcgtctatctcagtgagctggagggatgacttcgaatagaatggaaggcaggtttgtcctgagcagttcccagcttgaattttccctttagctcagtgattttgggggcccagtggagccaaggatcccgtggcgtcagagcaggaggggaggccaggccaggcaagactggaacaggagggaggacctttggggtgaggctgttggcaacgaaagtaagggtttctcataccttatcattcaatctattccttttcatacaagaagataaagacacagcagcaagaacaattattaaatgcatgaaaaaaacagagttatatgacagcaatattccataaaggaatcaaaacacaaaaaggcaaaaaatgagcttgttcagataagcagggtgccacacccacagttcaaaaagaaaatcgccttcaaggggttaaacttattcccaagcttgagagccatgttctgctgaagtggagacccagggtggaccagaccaggggtgacgaggcagggaaacctaaggatttaactctgtcagcctaccatgttctcttgccccattctcacagtgtggaaatgcttccctccttcaatgccttggtttttgccaacagaaaattctcacaaggagttgttacaggagaggggtcctgatccagaccccaagagagggttcttggatctcacacaagaaaaaattcagagtgagtccctaagctgaaagcaagttcatttaaaaagtagaggaataagggctgggcatggtggctcatgcctgtaatcccagcacttagggaggccgaggcagacaggtcacctgaggtcaggagttcaagaccagcctgactaacatctagtgaaactctgtctctactaaaaatacaaaaattagcttggcataggggtgcacgcctgcaatcccagctacttgggaagctgaggcaggagaatcgcttgaatccaggaggatgaagttgcagtgagccgagatagcgccactgcactccagtctgggtgacagagtgagactctgtctctcaaaaaaaaaaaataaaataaaggaataaaagaatggctactccatagacagagcagtcccaagggctgctggtggcccatttttatggttatttcttgatgatatgctaaacaagcggtagattattcatgcctcccctttttagaccatatatggtaacttcctgacgttgctatggcatttgtaaactgtcatggggctgttgggagtgtagcagtggggaccaccagaggccactctcgtcaccatcttggttttggtgggttttggccagcttctttactgcaacctgttttatcagcaagctctttatgacctgtatcttgtgccaacgtcctatctcatccaatgacttagaatgccttaaccacctgggaatgcagcccagtaggtctcagcctcattttacccagctcctattcaagaaggagttgctctggttcacatgcctctgacagactcattttaagattcagacctgaataaactgtcaaattcaaaaactgttgttactggaaaggtgtctccatccaaaccccaagagagggtgcttggaccttgtgcaagaaagaattcagagcaagtccataaagtgaaagcaagtttattaagaaagcaaaaggatgggccgggcccagtggctcacgcctgtaaatcccagcactttgggaggcagaggcgggcagatcacaaggtcaagagatcgagaccagcctggccaacatggtgaaaccccatctgtactaaaaatacaaaaattagctgggcatggtggtgcacgcctgtaatcccagctactcgggaggctgaggctggagatcgcttgaacccgggaggtagaggtttcagtgagccaagatcgtgccactgcactccagcctagagacagagcgacactctgtctcaaaaaaaaaaaaaaaagaaagcaaaaggatgaaacagtggctactccataggcagagcagcccgagagctgctagttggctatttttatagttatttcttgattatatgctaaccaaggggtggattattcatgagttttctggggaaatgggtgggcaattcccagaataagtgttcctcccctttttagaccatatagggtatcttcctgacgttgccatggcatttgtaatctgtcatggtgctggtgggagtgtcttttagcatgctaatgcattataattaatgcataatgagcagtgaggccaaccagaggtcactttggtcaccatcttggttttagtgggttttggctggcagctttttttttttttttttttttgagatggagtcttgctctgtcgcccaggctggagtgcagtggcaccatctcagttcactgcaacctccacctcccgggttcaagcgattctcctgcctcagcctcctcagtagctgagactacaggcacgcgccaccacgcctagctaacttctgtatttttagtagcgatagggtttggccattttggccagtctgatctcaaactcctgacctcagggatcttactgcctcagcctcccaaagtgctgggattacaggcatgagccaccgcacccggccaaaacaagtataactaatttatacattctattacttgatgtgttttttaccctctggatgctgctatcatttttctttctttctttctttctttttcttttttttttgtttttgagacataggctcgctctgtcacccaggctggagtgcagtgatgttatcgtggctcactgcaacctccgcctcccaagttcaagtgattctcatgcctcagcctcccgagtagctgggattacaggcgcccgccaccacgcctagctgatttttgtatttttagtagagacggggtttcaccatattggacaggctggtattgaactcctgacctcaagtgatccacccgcctgggcctcccaaaatgctgggattacaggcgtgagacaccgtgcctggccagagaaaagtattttgttgctgcttctgggtgcccagagaaatgagacatggggctgggttcacaggaaacgaggtgagttgtgagacaggggctggggtggggacactaaggtggcagttcagctgcatcttgcggccctacctggtgggggcgctgtgaccctggaccagcagcttggcctctctggacctcattttccattttgtaaagtgggcctggattattccagtaagagacacactatgtgtgaggatgctggcccagagtaggtgcttggttggggtgaacgccccttcgtctttccccatttcatttttctcttgaactgtgcacattattccttcatttgtcccacaaatatttgttgagcgcctgctatgtacgcagcagtgggtggcaaataagcaaaaagtccctttgaacctcagccttgtggctccactcagcttttctcccaggcaggacccttgcatttctgaatctctccactgggcttcacccagggatgatcaaaaaatatgagttccagaagatacattccccacacgagcatcagcccttcctttgcaccagaacctgtgctcacagctgcaaagaggcgtggatgagacccatccctccctcaagaaacatcttctccatctacttcccttcactgcaccctgcccttgagtcagggactatgatacgattttcctcatttattcaatctgatcccaaatacatttatccgatcccaaacacatgaaatctggcagatgctcatttttaaattgacaaagaaaatatgcacatgggccaagggcagtggttcacacctgtaatcccagcactttgggaggcccaggcaggcagatcacttgaggccaggagttcgagatcagcctgggcaacatggcgaaaccccatctctactaaaaatacaaaaattagccaggcatggtggtgcacgcctcctagctacttgggaggctgaggcacgagaatcacttgaatccaggaggctgaggttgcaatgagccaagatcacgccactacactccagcctgggtgacagagcgacactctgtttctaaatgaatgaatgaataaataaataaaatatccatgtggctagccagttaacccagtgccatttatcgaatatgtcaacttaaaaaagagtatctgccagatttcatgtgtttgggatcagatacatgaaataagtgtattttattggaaataaaaatatatttatttatttgtatatatttatgctgcacaacacatttggatatatgtatacatagtggaatggctccatcaagccagttaatatatgcattacctcacacatttatcatttcgtttggtggtgagaatgcttaaaatctactctcaataattttcaaatatacaataggttgttataactatagtcaccatcatgtacactagatctcttggtcctcctgcctaactgaaattgtgtgtgctttgatcaacatcaaaaagatgaacgataacaagtgttggcaagaaagtgaagagatcatgttaaaaccctcaacaaataaggcattaaaggaacatacctgaaaataataagagccgtctatggtcaacccacagccaacatcatactgaatgagcaaaagctggaagtattccctttgagaaccagaataagacaaggatacccactcttatcactcctattcgacatagtactaaaagtcctagccagagcaatcaggcaagagaaagaaataaaagacatccaaataggaagagaggaagtcaaactatctctgtttgcagatgatacgattttatacttagaaaactccatagtctctgcccaaaagctcctcaatctgataaacaactggtaaagtttcagaataaaaaccaatgtgcaaaaactcaataggatttctataaaccaacaatgtccaagctgagtgccaaatcaaaaacaccatctcattcacaatagccacacaaaaaaataaaatactgaggaatacagctaacagggaaggtgaaatatctgcctgtggtcccagctgcttaggaggctgaggcaggaagatcacttgagcctggaaagtcaaggctgcagtgagctgtgattgcgccaccgcactccaggctgggaatggactgagagcttgtctttttttttttttttttttttttgagctagagtttcgctcttgttgccaaggctggagtgcaatggcgtgatctcggctcactgcaacctccacctaccgagttcaagtgattttcctgcctcagcctctcgagtagctggggttacaggcgcacacaaccacgcctggctagttttttgtatttttagtagaaacggagtctcaccatgttggccaggctggtctcgaactcctgacctcaggtgatccacctgcctcagcctcccaaagtgccaggattacgcgtgagccaccccacccagcctctaaattaaaaaaaaaaaaaaaaaacaagttataaaagctccaggcacagtggttcacacccataatcccagcactttgggaggccaagatgggaggatcacttgagttcaggagttcaagaccagcctgggcaacatggtaagaccccaactttacaaaaaattttttttcaattaaagaaaaacatcttgctaaagaggtctcctcttcctgagataaacggctgcttgacagtaaatagaggcaggaaacctcatgtttgatctgctgcttgataacaagaagacatcaaaaccaccacagtagctgcttaagatgataaaaatgaccatcctcagtacataaagactgtgcatgaaataacttatctccagcttagaggaagttccgccccagctaccacacatttaacagatcttcccagaacatctgagctcatcactgagccaggagctgggatgactgcagtggccagggcagacatgatacctgctcttgtggactttacactggacggagaaggtggaggatgaattattggctgagttttagaaaagagcatgaggagtgtgaggaagagatggcagtggctatgggggatgaacaacctcatcctcagaaatcaggacacctggttgggacttcggggaggagatggcatttcagccaagacattctgctccaggagcagagggagaggaaagggtgcaccaggcagagggaagagcatgttccaacgacccgaggtgggaagatgattgcccatccaaggaaaagaagaaagacaatatgggccgggtgtgatggctcatgcctgtaatcccagcactttgggaggccgagatgggtggatcacttgaggtcaggagttcaagaccagcctggccaacatgatgaaattctgtctctattaaaaataggaaaattagccaggcatgttaatgcacacctgtaatcccagctactcaggaggctgaggcaggagaattgcttgaacccagggggcagaggttgcagtgagctgagattgtgccactgcactccagcctgggcgacagagtgagactccatctcaagaaggagaagaagaaggagaaggagaaggagaaggagaggaaggggaaggggaaggggaaggggaaggagaaggagaaggagaaggagaaagagaaggagaaagagaaggagaaggagaagaagaaggagaagcagaaggagaagaagaggaagaagagggagaaggaagaaggaggaggatgagaagaagaaggagaagaaagccaatatgggccgggcacagttgctcacacccgtaatcccagcactttgggaggctgaggtgggtggaacacttgagcccaggggttcgagaccagcctggccaacatggtgtaactccgtctccactgaaagtaggacaattagcccggtgtggtgatgcatgcctgtaatcccagctactcaggaggctgaggcaggagaatctcttgaacccaggaggcggaggttacagtgatctgagatcatccaacctaggcaatagagcaagactccatctcaaaaaagaaaaaaagaagaaggagaagaggaagaaagaaagacagacaaacaatatgacaggggccttgggcagcaaggagtggggagtggctcatggagccaaaatagacagtcaggggtctgatttcaaagggtcccaacagccccaagattacactcatctacacgggtgatactgtctgtccatgataaacacagaaggaacagtgggttcaaatgaggtcaatcacacctggaaaatgaatttcaaataaactcaggaatagccattcacatttcaaaaggattttgcaactcacaaatctccatagcattggaatgagagagtcatttgcttgttttctcagcaagtatttattgagcacctattagatgctgggtggtgggacacaatgatgagcgagtccaaagtggtcctgcctcctcaggtggccagtctagtggaaggaacaagggatatgtctattaagtaacttatatgacataatgcagttagcattacagtagaagtagaagcctcggcccctctcagagctctggaaaccttcccctccatctactccagcagcatgggaagttcacgggggccacagctggcaccaagtgttttccacgctttgcttctgagggccaagatgccatggtgctttctgtagcatttaactgtgtggagctctgggactcttgtgtcttgggggaagaaaggaccactttttttttttttttttttttgacagaatcttgctctgtcttgcccaggctggagttcagcgaatgatctcggctcactgcagcctccgcctcctaggtgcaagtgattctcctacctcagcctcttgagtagctgggattacaggcgcctgccaccacacccgactaatttttgtatttttagtagagatggggtttcaccatgttggccaggctggtcttgaactcctgacttcaggtgatccacccgcctcggcctcccaatgtgctaggattacaggcatgagccactgcgcccagctgaaggaccacttctaattcctacctatgtctcttgctgctaattaaacatctaagtttagaggctaagggggatactacctggggaccattcctccggactggagtgagcctgtgtttctgtcttcatcttagccccgagctatggatcaaacctcggctgcctgcagctctgtggttgatcctgagggactccttcatttacacaaatgaagtgtagataagaattgtgtgtcaacttttaatgagccctcaagggtcattgaaaaatcccatggctagttcactgatgaaacttagaattggcttcccagggattgttatgacaatagagtttggtagatcgtgccggcaggtgttccactgggctgtttgatgccactcaaggctctagccaagcgcatctctgatgtgtcctccaggaagggtgtccaggggctttgactgatgagcacggggagttttggaggagggctggaggtggcgggttcagatgaattctactaattgcttggtatatggaccccatgacatcacttcaactgaattctctgggagtttgtttttgtttgtttgttttctgtttttttgtttttttttttttttgagatggagtctcactctgtcacccaggttggaatgcagtggcacaatcttggttcactgcaaccactgcctccagggttcaagtgattcttcggcctcagcctcctgagtagctgcgattacgggcacttgctaccacacccagctaatttttgtatttttagtagagatggcattttgccatgttggccaggctggtcttgaactcctcaacttaagtgatcctcccacctcggcctcccaaagtgctgggattacaggcatgaaccactgcacccagccattgttttctttgtttcagcagagatccactggacgtatgaattgtggatttctctttgggttcttaaacacagattaacaggcagagggtgacttgtataatagtctaagtggcttcatgcctcaggaccctggctcacatcagataaacttgactcgaatcctggcctacctatttcctggttgtgtgaccttagtgaagtgaattgacctctctgaacctgtgtctgcaaatggggaggccaataataatagcacctgccccacagcatgatgcctgtaaacgtattggcatttcataaatcctcaatacgtgctagacagtatgattgtgtcacccagtagagtcttgtagggatctgggtacaactgatggagccagctcatggctttacttacctcacccccacgcctttaaaactcatctattcatgcctgtattaaggatttattcaacactttttgtgttccaggctgtaggaaccaaaccttgtctgcctgcagctcaaacaagagaacaagcaagatgagatcctctgccctcctggtgttttttttgttctcgtggggagaaaatgtattaaaatatgagttactgcatcagacatataaaataataatttcaagaaaatggatctgtgattgtaaatattgggtcaaatttagcatcagagtaaacaaataaatggatattatgtcacaatcagggcggactgtaattaaatgactttctagagtgcggctgcatccccatgaagctcagaccccattgttgcctttttattttattttattttatttatttatttttgagacagagcctgttgcccaggctggagtgcaatggcgtgatctcagctcactgcagcctctgcctcctgggttcaagcgattctcctgcttcagcctcccgagtagctgggattacaggcgcctgccatcacgcctggctaattttttatatttttagtagagatggggttttaccatgttggccaggctggtctcaaactcttggcctcagcctcccaaagagctgagattacaggcgtgagctgccactcccgatctggtcttgatttctctttttttaaggacactaaccccactgggcgaccctactttcttggcttaatcttaacctaattacattccaaaggccccatctccaagtattatcacatggggggttagggcttcaacacatgaatttttggggatacacacattcagctcataaccctgatctgaagctaagtttctgaaccaggagcaagaaactactcttagtttctgatagcttgtctccatgaccctggaagaaaaatcaaacattatgtttcttttctctgcagcaaggatgcaggcatctatctcattcccacacagttccaggttcagttcccttgcagtcctaaggttcagggcagtgagagcaagaaccagaccaggttcctatttgacctaattcctttttttttttttttcctttttttgagacaaggtctactccgtcacccaggctggggtgcagtgttatggtacgatcaaggctcactgcagcctcaaagtcctggcctcaagcaaccctcctgcctctgcctcctgagtacctgggagtacaggtgagtgccaccatgcctggataactttagtattttattttatattttattttatttatagagatggggtttcaccatgtttcccaggctggttttgaactcctgggctcaagcgacctgcccgcctcggcttttcaaagtcctgggattacaggcatgagccactgaccatggcctaatccaaaatgatatttgttggggaagaagtgttcctacggatcgtgaccttgttatgccatgactgtttggctgtgagtgatattcctgtaaatatgtgagtttgagccaggttcaaggaacgatcatgcctaattcttttttattctttcaataaatatttattgagcaagtattctgatgggtttgaactgggcttggatgcagcaacaggactgggaggatcacatcccttagccagttcctcacattgatccaccattgcctcacagactttggtcttttactgccttaataattttcactaagaaccatctgcactatgacgtgtttctctcgatggactcactctttttttttttttttttttttgagacaaggtgtttgttgcccaggctggagtgcaatggcacaatctcagttcactgcaacctctacctctgggttcaagtgatcctcctgcctcagcctcctgagtagctggaattacaggcacgtgccaccatgccaagctaatttttgtatttttagtagagacggggtttcaccatgttggctaggctggtctcaaactcctggcctcaagcaattcacctgctttggcctcccaaagtgctgggattacaggcatgagccactgcacctggccaaagctgccacttttaaaccatcagatctcatgagaactcattcactatcatgagaacagcgtgggggaaaccacccccatgatccaatcacctcccaccaggtccctccctccacgagtggggattacagttcgagatgagatttgggtggggacagacagccaaactatatcaggacctgagggcctcagctatctttttcctgaaagcttcaggctaattgcatcagaagaaagcctctgatctgggtgtttagtgaaatagaagttggtcccctgtattggtcaacctaggtttggaatgctgcagtaacaagtagtgaccttgaaattttagcaaccataaaccaaaactaaaattctaaggcctcccaaccatctgaatggactcctcctttctcggccaagggtattccaaagttaacctgaaaaacctgaacctagttcaggccatgatgggaagagaaggtagaagtagaaggggccagacatgcctcattacagcctcctcccttttggtattcaggaaaagcagaccagcataaacgtcaatgcagaccttaagtctgataagaaacatttaccatctattctctctgaggcctgctacctggagacttcatctacataataaaaccttggtctccacaaccctgtatcataatccagacattcctttctattggtaataactctttcaacgaattgccaatccaaaaaaattttttttttttttgagacacagtcttcctctgtcgcccaggctagaatgcaacgttacaatcttggcccactgcaacctctgcttcccaggttcaagtgattcttctgcctcagcctctgagtagctgggattacaggtgcccaccaccacgcccagttaatttttttgtatttttagtagagatggggtttcaccaggtttgccaggctggtttcaaactcctgacctcaggtgatccacccaactcagcctcccaaagtgcagggattacaggcatgagccaccgcacctggcctgccaatcagaaaatttttaaatctacttatgactgggaagcccccactctgccaaccctgcatcgctgcccagcttcaagtcgtcccacacgtccagattcaactaatgcaaatcttacatgtattgactggtgtattatgtctccctaaaatgtataaagccaagctgtaccccaaccaccttgggcacatgttgtcagtacctcttgaggctgtgtcagggttacatccttaacctgggcaaaataaattttctaaattgattgagacctgtctcagatattttcggattcacacaactgacaaccacaaagcttcatttcttggctacatttatatccatagtgggtccacagaagctctgttctgcagggtcttcttccttgcaggaccaagtgtgaaaaagtggcctctctctgggatgggctgttcttgtagcaagggaaaagcaaaaataatataaccacataaggctcttaaggttcctgctcagtggtggtacatgccaattcctgttccatctcattacctcaagcaggagcatggccaagcctggctttaatgggagtgggaactacaatccccttgcagggatagacggacccaacattgctcctggggcgtttcttccactcagcagaaatcagaaaaggacatgaaaagtgagtaagccttgtgccaagaaagactctaggctttggagaaacgtcctttattgttgcctctggggattcagagcccagagagggcagggatggaggttgaggatgcacaacaagaggtttacaccaatcttatggggtaggggcctaggtcagcagctctgcctcttctcacagatgtaaacaggagactctgatttgcaagaggagttgctccagtgtccctggtagagcatcatcacacaggctggggtggttccattatcatccaatttcctggagtcccagtttctgtgaagagatgcccaccacatccctttctgatgggaccagagcctgaagccccaactcctgccctctgtgagtcaggatctgccacctgaagctcaagaggcccccagttattggggcctcttattgagcccattgtatggccacttattgagcccattgtatggtaaccatctggtcaaccccttccctctttttttccaagtggagctcagataggagtagcaacaaggccacagtcttcagaaaagctgaaagtcttccagctcctgggccaccatccgactgccccatccctctgggcttctccccttctccaaggtccattccgcttgaaaccagacagaccccattcaaattccagctctgccacttgtatctgtttgactacggtcttaatgtctatgagctgccgtttcctgtttcacaaaatagaaattcattctgaggatatgatgaccagtgcacataaggtatacggaaggtgctcagattgcagatcaatctgccaatgagacaacttctgccctaagcttggccccatgcagagcagcttgccagtcagggaaggtgatgcaggaggtaggaaatgtcgcagaaaaaggcatacagtgtgaggatgcaagacaatgccaagaggtatagtgaattaaagtgtcctctccaaaaatatatgccatgtccaaccccctaacacctgtgcatgtgactttacttggaaagggggtctttacagctgtaattaaatgaaagctctcaagatgagatcatcctgggtttgtcaggtgggccctaaatccaatgttgagtgtccttataacagacagaaaaaaggagacacagaggtgaggagaaggccgtgagaagacagaggcagacagtggagtgatgccgccgcaagccaaggaatgcctggagccaccagaagctggaaaacacagggaaagattcttcctcagaccctttggaaggggcatggccctaccgacattttgactggaaacctctggcctccagaacggtgaaagaacacatttctgttgttttaagccacccagtttgcagtactttgctatggcagccatgggaaagtcatacagttggcaaatgctacattgtttcactccttctgagtaggcttagtgctcattagcacattcagggctctgaaaagtcctgcaacaaagaaagcagtttgacaacaggtgctggcaaggttgcagagaaacgggaatgcttttacgctgttggtgggaatgtaaattaattcaaccattgtggaattcctcaaagatctagaaccagaaatatcatttgacccagcaatcccattactgggtatatgcccagaggagtataaatcattctgttacaaggatacatgcacgcctgtgttcattgaagcactatttaagacatggaattaacccaaatgaccatccatgatagactggataaagaaaatgtggtacgtatacaccatggaacactatgcaatcgtaaaaaggaacgagatcgtgtcctttacagggatatagatggagctggaagccattattttcagtgaactaatgcaggaacagaaaaccaaacacagcgtgttctcacttataagtgggagccaaacaatgagaacacatggacacagggaggggaacaacacacagtgaggcctgtcaggaggtggggttgggggagggagagcattaggaaaaatagctaatgcatgctgggtttaatatctaggtgatgagttgataggtgcagcaaacaatcatcgcacacatttacctatgtaaccaacctgcatatcctgcacgtgtaccccagaaattaaaattcaaataaaatttaaaaaagattatgactctctctgaaggctcagatgattgttagcactttttatcaataaagtatatttaaatttaaaaaaaaagagtttgacattgaacccataatttctcaagcaccaaactgggaacactcttgtcaagtaacaaaataactataactaggataatagaaaagatgtcggctgtgcgcggtggctcacgcctgtaatcccagcactttgggaggccgaggccggcgaatcccctgaggtcaggagtttgagaccagcctggccaacatgatgaaaccccgtctctactaaaaatacaaaaaattagctgggtgtggtggcaggtgcctgtaatgccagctactcagaaagctgaggcaggagaatcgcttgaacccaggaggcagaggtggcagcgagccaagatcgcaccactgcactccagcctgggcaacaagagtgaaactccatcttaaaaaaaacaaaaaacagaaaggatatcaggcagtttgggagctactacgggtacttcattgtgaatgaatgaaagagaaacacctacagtggtcataacttactgcctgaaagccatgcctgcctcttaggggagactatctttggtgtcaaaggagatactcacatgtaggtgggggctgagccatccatccacctgtgggcacttccttggccatctttgaagaggcctatccaggatgtcgcctggttagttgatgtcaggaagtcctggaaggaagaagttacatttgggaggtggaattccttggaagctgaaaggatggaggcaggggtgtacagagggcgagaggagtaagttgcagagatcacagttagatgggcaggcagacagaggcaggcagggaattcactgcccttgaatcttgactttgaatctcagatctactatgtattaggttggtgcaaaagttatcgtggttttaccactatagaaaacagtgtggagattccttaaagaactgaaaatagggccggacacggtggctcacgcctgtaatcccagcactttgagaagccaaggcgggtggatcaccggaggtcaggagttcgagaccagcctgaccaacatggagaaatcccgtctctactaaaaatacaaaattagctgggcatggtggcacatgcctgtaatctcagctactcgggaggctgcagcaggagaattgcttgaagctgggaggcgaaggttgcggtgagccgagatcacaccattgtactccagcccgggcaccaagagcaaaactctgtctcaaaaagaaaagaaaagaaaaaaaagaactaaaaatagaactaccatctgatctaccaatcccactactgggtatctacccagaggaatagaagtcattatacgaaaaagatatttgcacaagcacttttatagcagcacaactcactattgcaaaaatatggaaccagcccaaacgcccatcaatcaatgagtggataaagaaactgtgagatagatatatactgtgagatatatatatactgtgagatatatatatacacatatatacacacatatataatatatacacatatgtatactgtgagatatatatacacatacacatatgtgtgtatgtgtacatatatacatgtgtgtatatatacatatatacatatataatatgtgtgtatatatatacacatatatacacgtgtgtatatatacacatatacatatatacacgtgtgtatatatacacatacatacatatgtatatatgtgtatatgtatgtatatatgcacacacagtggaatgctactcagccataaaaaggaatgtattaatggcatttgcagcaacctggatggaattggagaccattattctaagtgaagtaactcaggaatggaaaaccaaacatcgtatgttctctcataagtgggagctaagctatgaggatgcaaagacataataatgacacaatggactttgggaacttgggggtaaagggtgggaaggggtgagggataaaattaggttcagtgtatactgctcaggtgatgggtgcacaaaatctcacaaatcaccactaaataacctactcatgtaaccaagtaccacctgacctcaggtgatccacctgcctccacctcccaaagtgctgggattacaggcgtgagccaccgtgtccggccctattttcagttctttaaggaatctccacactgttttctatagtggtaaaaccacaataacttttgcaccaacctaatacatagtagatctgggattcaaagtcaggattcgagggcagtgaattccctgcctgcctctgtctgtcttcccatctaactgtgtctctgcatcttactcctctcgccctctggacacccccgcctccatcatttcagcttccaaggaattccacctgttcccccaaaacctatggaaataaaaaataaaataatcgcagtttttgccattgaaagtaatacacgttgcaatggcctccaacaattcagccacccctcagtttccccatcagcacaaacaaaagaatggagatccccagctcttaatatattctcacggccgggcacgttggctcacacctgcaatcccagcactttgggaggccgaggtgggtggatcacgaggtcaggaaatcgagaccatcctggctaacacagtgaaaccccgtctctactaaaaatacaaaaaaacatttagccaggtatggtggcgggtgcctgtagtcccagctactcgggaagctgaggcaggagaatggtgtgaaccctgcaggcggaggttgcagtgagccgagatcgcgccactgcactccagcctgggcaacagagcgagactctgtctcaaaaaaaaaaaaaaaaaaatatatatatatatatatatatatatatatatatatattctcacaagtcaattgtgagaagtgtgtgcacctaggaagaccccctggataaatattggctgtgagtgtgcatgtcagagcaagcagtttgatctataggccgtaggaagacttctgtcaggagactcaatcccagggacaatcttgagaccctatcttaggtcaagccttgtttttggcctaggagacccagacatgattcagatctagccccagagtcagtggataccaggcaaccccaatgcagcatgaagttctgggataaagatctctgatgggccgggcacggtggctcatgcctgtaatcccaatactttgggaggcagaggagggtgtatcacctgaggtcaggagatcgggaccattctggccaatatagtgaaaccccatctctactaaaaatacaaaaattagctgggcgtggtggcgggcgcctgtagtcccagctacttgggaggctgaggcaggagaatcgcttgaacctgggagatggaggttgcagtgagctgagattgcgccactgcactccagcctggcgacagagtgagacttcatctttaaaaaaaaaaaatctctgatgatgctacaagaggatgtggaggaagggatgtttgtgttgggcttttgagggatgaataagacttctccatgcagatggcaaaggaaaggactgtccagagagtgacccacaggaatcagagcttcgagacaagactacagtgcacagggtccgttccctgaatgacggagcagtgagattgggctggggcaagggaaggcagatcttcaagatcctactaagagtactgtacatgatcccaaaggggataaggataggaatcccaaaattcttgtagaatccttcctccacctccactagggtcctaactttccgtttcccacctattctgctcagctgttgatgacaaccaagtgagctgcttctgggcacaagaatcaatggcctggggccaggtgaggttgtctgaaaagaagctgtaacaggagccctggaaggccttccagctcttggggcagggcaggcaggaggattctgtgaggatggagccattagcaaatttagtgtatccagctttccacccagttgcccacccactcgcttctggccacattcctaatggcttccacttgaatacacccaacaatggggaactcactacctagacagttggtgcttgacattactgaaacatatcagaaggacatactaaaatgccataaatatcctactgggtgtgttagctcacgcctgtaatccaaacgctttgggaagccaaggcaggtggatcacttggggtcaggagtttgagaccaacctggccaacatggtgaaaccccatctctaccaaaaaaaatacaagaattagctgggcatggtggcacgcacctagtcccagctacttgggaggctgaggtgggagaattgcttgaatccaggagctggagattgcagtaagccaagatggcatcactgcattccaccctgggtgacagagtgaagctctgtctcaaaaaaaaaaaaaaaatgccataaatatcctattaagtggaaaaggcaactgtaggaataatgtgccaggcgcggttggctcacgcctgtaatcccagcacattgggaggccggggcgggtggatcacttgaggtcaggagttcaagaccagcctgtccaacatggtgaaaccccatctctactaaaaatacaaaaattggctgggtgtggtggcgggtgctcataataccagctactaaggaccctgaggcaggagattgcttgaacacaggaggcagaggttgcagtgagctgagatcacaccattgcactccagcctgagagaatgtgaataatatactacctttaaataaaatagaaaagcatatgtttgacattccttgttttcttaaagaaactctacggctgggcacagtggctcacgcctgtaatcccaacactttgggaggtcgaggcaggtagatcacgaggtcaggagatcgagaccatcctggctaacatggtgaaaccccgtctctactaaaaatacaaaaaaaaaaaaaaaattacccgggcgtggtcgtaggcacctgtagtcccaggtacttgggaggctgaggcagagaactgcttgaacctgggaggcagagcttgcagtgagccgagattgcaccactgcaccccagcctgggcaacagagcgagtctccgtctcaaaaaaaaaaaaaaaagaaagaaagtgtaaagcagtggtccccagtcaggggcgattttgtccccagtggacatctggcaatgtctgaaggcatttttgttcaccacaactagcggagaggtaccactggcatggagaaggtagagaccaagggtgttgctaaacaccctgcaatgtacaggacagccccttactgcaaagaatgattcatccccacatgtcaatcgtattgagtttgagaaaggctgccctaaaggaataaagcccagctaattccagtagttcttgggagtttgtgttggggcttaggtggggaacatggcaatgaggtttcaggagtgggagggaaaattctcactgattttatctatatccatctacagaacacatacaccatcaatcattacttgtgggttccatatttacaaatccacctactcactgaaatgtatttgtaaccccagagcagatacttatgtcattttgggggtcatttgtgcggataagcagagtagtgaaaagtttgagtctgagatagaagaaaagaactctctgctgtcttgtttcagctttcctgctgtaaacaagtgtccttttcatggactattaagtgccatgtttttcacatttttgtgcttttctttctttctttctttttttttttttttttgagacggagtctcattctgtcgcccaggcaggagtgcagtggtgcgacctcggctcactgcaacctctgcctccggggttcaagtgattctccagcctcagcctcccgagtggctgggactacaggcacacgccaccgcatccggctaatttttgtatttttagtagagatggggtttcaccatgttggccaggctggtctcaaactcctgaccttgtgctttttgtcgatgactttgttgttgaaaatggccctggcataatgctgaagcactgtctagtgttcctaaatgcaagaaggctgtgatgtgcctcgtggagaaaatatgtgtattagagcagcttcattcaggcttgagctatagtgctgttgaccataattcaaagtgaatgaattaacaatatatataacacgtatttaaacagagcctgtaatccagcactttgagaggccaagttgggtggatcacttgaggccaggagttcaagaccagcctgggcaatatggcgaaacaccgtctctactaaaaatacaaaaattagctgggcatggtggtgcatgcctgtattcccagctgcttgggaggctgaggcaggagaatcacttgaacctcggaggcagaggttgcagtgagccaagatcatgccagtgcactgcagcctgggtggcagagggagactctgtctcaaaaaaaaatgtatttaaacagaaacacacacaaacaaggctacgtaatgatcagttgacaaaatgctgtgatgagagtctcgctggaacctaactgtattttctcctgggacctgtggttcaggattcatgaaatcagttctctctggacttcatagtgtgtagcaatggtggatactaagactcaacggcatatacagcatatctcatcctgtcattcaaaagttctatttacattctgttaagtgaaataagctaggcacagaaagataaatcctgcatgatctcacttatccgtggaatctaaaaaatctaattcgtagaagcagagagtacaaccgtggttaccagggaatgggggagggggggtggggtaaggagatgttggtcaaaggatgcagagtttccatcagacaggagaagtaagtttggtcatgatccactgcacagcatggtgaccatagttaataataatgtcatctctattccaaaattcctcaaagagtagattttattttttcttttctttctttctttctttctttctttctttccttctttctttcttgctttttgttttgtttgtttgtttgagacggagtttcactcctgttgcccaggctggaatgcaacggcacaatcttggctcactgcaacctctgcctacggggttcaagggattctcctgcctcagcctcccaagtacctaggattaaaggctcccatcactacgcccggctaattttttgtatttagtagagaaggggtttcaccatgttggccaggctggtctcgaactcctgacctcaggtgatccgcccgtctcagcctcccagagtgctgggattataggcatgaggcaccacgcccagccaagagtagattttaactgttctcaccacatacacacaaaagaatatgtgggtgaggtgatagtttcattagcttgatttgctgatagatatgttcattagcttgtggaatgattattccacaatgtatgcattttaaatttttatttttatttttatttttttgagacagagtctttctctgtcacccaggctgcagtgcagttgcatgatctcagctcactgaagcctctgcctcctgggttcaagcaattcttgtacctcggcctcccaggaaactgggattacaggcataggccatcacgactggctaatttttgtatttttagtagagacagggtctcaccatggtgccgaggctggtctcaaactcctggcctcaagtgatccacctgccttccttggcctcccaaagtgctgggattacaggtgtgagtcactgtgcctggcccacaatgtgtacctttatcaaaacctcacattatacctcatggatctatacaattatccattgaaattttataaaacatttcatttaattaaatgttcatttaaatttaaattaaacttgcattaaagtcaattaaatatttttcaaagttttattaactttttgatatcgacttaattttttttagttttgggaaggaaaagagttctacttaaaatatgtagcacaaaggtaccacctacaacggaatgtgatccaatagggttgtgtggaacccaggcatctgcattttagcaaactcgctgcattcatctgacaggctgcagaggacccactgtattttgcagcacactgatgtggtgatttaaagtggaggctccggtcagaggtagatttacagcagacacctgtaatcccagcacttttggaggccaaagtggaaggatcgcttgagcccaggaatgtgagacaaggctgggcaacatagtccagggaaagaggaggggagggaaggggagggggagggggaagggaggaggagggagaggggaggggagggagagggggagggggaggggaagaagaaggggaggggaagggggaagggaggggagggaaaaagaaaagaggaggctctgaatcctgacaatgactcttgagaatgacactgctcatttccccccgattctgcagctgagggaactgaggctgagagaggttaaaggggctgtccccgcggttgcacacagccacacctgcagagcaggtctcactgtcctcaaagccttacttttctggtatcccttcactatccgttggtctgaccatgtcacctcaactttctccatgttccgctagcactaaaaagacccaagaatcccccgggcattgggctgcctttccgagatccctgctacaggaagcccccgtcaccagtgccgaaaggagcagagtccccgcccttcccccacctccctttccccactcctcaccattgcgtgcctggacaacctttatttgcctgaacatttcaccccgaatgaagtcccggtcatgtccggtgtctgccagccccggtgtcactgagagacccaaagagaacgcgctggtaaaggtcttggcagagttgcgggttgggagatgtgattaagggtcggggggcggggcatctccttggacgcccactcacctttttcatcccgcacatccttcgtcatcctcaagactggggagagacgccagcagcatgttctagacgctcccctcactcaaagaacctccctggggtttctctgtgttcccccaactcccagagtccaagactttcttccagccccagggcaaggcactttggagctctgaaatgttccactcattttgcggatgagaaaacccaggcccagggacataaagtttcttgtctaaaagcaaccagctagtgagtagtaaggagggaatttcattccagtgtgtctggactgtttagggaatgcaggcagcctggaggttctaatcccagctcagggctgggcttaggggaggtgctcaccaatgactcaaacctgctcgctaatgattctgctccttcagttcatacacacccccgcatgcctccctctgaggctggtgaggaggtcagctccctcctgtgtcaccatggtcacccccagggacacgaccagcagcccctccggctccacccctatcccagcgtttccgaatccgacccaccctacaggttgggagccctcatggctgctgtcccggggccacctggtccccctgattcagccgccttacctctggacagaagcacactgaggagaacaaccaggagaagcaggatcagagacaccaccgggcagagatacttccaggtctttttttattttttattttattttgtttttgttttttttttttttttccgagacggaatcttgctctgtcgcccaggttggagtgcagtggcgcaatctccgctctctgcaagctttgcctcctgggttcacgccattctcctgcctcagcctcccgagtagctgggactacaggcgcccgccaccgcgcccggctaattttttgtatttttagtagagatggggtttcaccgtgttagccaggatggtctcgatctcctgacctcgtgatccacccgtctcagcctcccaaagtgctgggattacaggcgtgagccaccgcgcccggcatttccaggtcttgtcatggggcttctgtgcccgttgccctgggtggaaaccaggtcagcttcccctcccttcagggatacccactctcttttccttagatgcccgagactcctctcaggctgcagggaaatcgctgaatcccccgtgctcttctgggacccctgctgaatgcaccggatgttgaggactcagaaaagactagaaaaagaagcctgtccctctgggatgtggagtaatgaggaggaagcctcagaaagatgggaactccatgccctctctttctcctgcctatggttagagtgcaggggcaacccagcacccagctctttttttttttttttttttttttgagatggtgtctcgcactaccacccggcctggagtgcagtggcacgatctcagctcactgcaacctccgcctccagggttcaagagattctcctgcctcagcctcccaagtagctgggattacaggcgcccgccaccacacccagctaaattttttgtattttttagtagagacgggttttcgcctgttggccaggctggtcttgaactccttaccttgtgattcacctacctcggcctcccaaagtgctgggattataagcgtgagcctccgcgcctggcccaccaagctcttaattgcacataaaagggtttctggtcccagcttcttgactcaccagtttcccccagcctggggggaagtttgggccccaatgctgataattctttggggtccttgctgctagcatccctgccttcaatcatgaccgcagctcactctgctctgagatgctcctactctacatgcttatttctgggaaactccacccagcccttggaaggaaacactccccttcaagtctcttacactgctcctccttcctggcttagagtgtggcccgagatcctgagatatctggtcatctgttaacacagccggaaagaggacctgggtctctgagctcaggaggcagtgggcaccaagtctcctctgcaaagctgatttctgtccaaggtgactgaaacacaaagcaacagagaacggaatctcagatccctgtactgacacccccaccgccactctctgcttctcacagcttagcatgaaaagtgctcttggcttctcacgatgaagtggtggacatttcaaccgaggaaatgatttgtgtgactcttttcttggacaccgaggacaatgacatttcccaacagctttcattcatctccccagctaggtagctacttgtagttttaatgtggccaacaagcatatgaaaaaaaaatctttacatcaccggtcactagagaaatgcaaatcaaaaccataatgagattccatctcacatcagtcagaatggctattactacaaagccaaaaaataacagatgctgggggcagggggttgcagagaaaacggaatccttatacactgttggtggggggtgtaaattagttcaaccatggtgaaaagcagtgtggcgattccttaaagagctaaaaacagaactaccatttgacccagcaacctgattatagagtattcatccaaaggaatataaatcattctaccataaagacacacacatgagaatatttatcgtagcactattcacaatagcaaagacatggaatcaacctaaatgcccatcaatgatagactggataaagaaaatgtggtacagatacaccatggaatactgtgcagccatgcaaaagaacaagatcacgtcctttgtaggaacatggatggagctggggtccattatcttaagcaaactaacgtaggaacagaaaaccaaataccacatgttctcacttataagtgggagctaaatgatttgaacacacggacacatagaggggaacaacacacactggggcctattggaggctggagggtaggaggagtgagcggatcaggaaaaataactaatgagtactaggcctaatacctgggtaacaaaaataatctgtagaacaaactcccgtgacacaggtttacctgtgtaacaaacctgcacatgtacccctgaacgtaaaatgatattttaaaaaaatgaatacaggccaggtgcggtggctcctacttgtaatcccagcactttgggaggccgaggcagacagatcacctgaggtcaggagttcaagaccagtctggccaacatggtgaaaccctgtctctactaaaaatacaaaaattggctgggcgtgagggtgggtctctgtagtcccagctactcgggaggctgaggcaggagaatcacttgaacccaggagacggaggttgcagtgagccaagatcacaccattgcactccagcctgggcaacagagagagattccatctcaaaaaaggaaaaaaatatccaatccactgttgatgggcacctaggctgattccacatctttgctattgtgagtagtgctgcagtaaacacacaagtgcatgtgtctacctagtagaataacgtattttcttttgggtagatacccactgataggattgctgggtcaaatggtagctctgtttaaagttctttgagaaatctccaaactgctttccacagtggctagaccaatttacattctcaccagcagtgttcccttttctctgcaattttaccagtatttggttgttttttttttttttcactttttagtaacagccattctgacgggtgtgagatggaatcttattgtggttttgacttgcatttgtctgatgattaacgaagaggaacattttttcatttgtttgttggctgcttccctattcaataaatgttcgtgggataactggctaaccatgtgcagaagaatgaaccgggaccctgacctttcaccatgtacaaaaattaactcgagatgaattacagatttaaatgtaagacctcaaagtattaaaatcttagaagaaaacctaagaaacatccttcttgacatcagccttggcaaataatttttggcaaatcccaaaaaccaattacaacaaaaacaacagagtgagactctttctcatatttatattgagtatcacagtcttctaaataattccaatgtattgaaatataatgccctaatcctgatatttgttgttttaggtcactatgttttggtggggggctgacttgttacatagtaatagacaactattacacaggcttaagcacttaataaatatcttttttttttttttttttgagacagagtctcactctgtcacccaggctggagtgcagtggtatgatctcagctcactgcaacctccacctcccgggttcaagcaaagctcctgcctcagcctccctagtaaagtagctgggactacaggcatgcaccatcatacccggctaatttttgtatttttagtagagacgaggtttcaccatgttggccaggctggtcttgaactcccaacctcaagtgatcctcccgcttcggcctcccaaagtgctgggattacaggtgtgagtcctttttttttttttttttcttaagatacagggtctcactctgttgcccaagatggagtgcagtgtgcctggccttaataagtaccttttgaaagcacaaatgaactatacaattggagtttatcatacagaagcacagtccgactgggacccaactgtgtcagcgtcactcccagataccttgcctatcagcacttccttatgacaaccacgttaaaatcatatgttacctgttcatgaaataaatcgcaattaaaggacaactgctcaagttctagccaacttcttgggggtgagtctggggagaagtttagaagcaatatttctgacaaataaatagcgatatcgtgtggtactagtgttgatcgtgtttgtcatttattcagaaatgtttactgaaccggctgggggtgatggctcatacctataatcccagcagtttgggaggctgagacgggcagatcacttgagaccaagagtttgagactagcctggccaacatggcgaaaccccgtctctactaaaaatacaaaaactagctaggcgtggtggcacacacctgtaatcctaggtactcaggaggcttaggcacgagaatctcttgagcccgggagacagaggttgcagagagccaagactgcaccactgtactccagcctgggcgacagagtgagatgaaaagaaaggaagagagagagagagagagaaagagagagacagagagagagagaaagaagaaagaaggaaagaaagagagagaagaaagaaaaagaaaggaaggaaggaagaaagaaagaaaaaagaaagaaaaagagagaaagaaagaagaaagaaagggaggagggaggaaggaagaagggagagatggatggagggagggaggaaggaaggaaggagagctagagatagaagaagaaagaaagaggaaaaaagagaaagaaagaaagggaaaggaaaggaaaggaaggaaaaaagaaagagcaaaaacaaaaggaggggagtggagggggatcacgccactgcactccaacctgttgacagagtgagactccatctaaaaaaaaaaaatgctattttatattttattttttgagatagtctcactctgttgcccaggctggagtgcagtggcgcaatcttggctcactgcaacctccaccaaccaggttcaagtgattatcttgcctcagcctcccatggagctgagactacaggcgtgtgccaccatgcctggctacatattttgtatttttagtagagatggggtttcgccatgttggccaggctggcctcaaactcatggcctcaagtgatccacccacctcggcttcccaaagtgctgggattacaggtgtgagccaccgcgtccaggctaaaaatgctgttttaaacactgggaagcacaggaaaagatgctcaacattattggtcattagagaggggaaggaaggggcgggggaggggagagaaggagaaatatttactgaattatgtctaggctctcttcaagcaggtgtcttagatgggtctccagaagcagattgagataaagagcctggtgttgggcctattgttaagtgtgagccttaatcggagagggggtgcggttcactgggaacctctagaggacagtgtagggaatgcactgagttattccaggaaaagggctggagggtggggggttgaaggattcatctgccagcaaccatcagtccttggttaagaaccaatcaatgagaggttaatttcccaacacttctgggcttgtctgagaggcagagtgagatccagctacaggaagctctgcagcaaagagacgttggcagttggaagacaggatagtaaatattgcaacagcaatatgcaaagagttacaggcagagctctaacagaatctactataattgaataaacagaacaagaacagacaggacaaaagagatctctctgccttatggaacttgcagctcgatgaagaagacaaacgataaaggattgcgtaccctatctgctttcaataaactaggaaacaaacactctctcagagcaataaaatgctatgacaaaaactgatcatgggataaaaattatctgggatggggggctgtttagatagaggaggaagagcttggatgaaaaggtgccatttcagccaatcctggaatcagatgagactcagtcacaaaagagctgggagaaaagcattccaagcacagggaaccgcaaatccaaaggctgtgagagaagaacagagagtctattagggaatcagaattgagcccagggcggccaagtgcagagagggagggagagcagctgggaaggaggtttgaggggtctgcagggatcagtggtgccgagtcccttatgctaagagataaatgtttgtagcaggatcttattgggagacattcactgaggtttccttcagctcccacccccttgcacttccatgtgcccccatcgctttcagaaaaaaaagaagcgcctcctatatgcacagcagagagggcaggcagagctcattcaatgagcacacgttagaattcttggccaggcgcagtggctcacgcctgtaatccccaactctttgggaggccgaggcaggcagatcaggaggtcagaagttcgagaccagcctgaccaacatggcaaaaccccgtctctgctaataatacaaaaatcagccgggcgtagtggcacgcgcttgtaatcccagctactccagaggctgaggcaggagaatggcttgaacccaggaggcggaggttgcagtgagccgagattgtgccactgtactccagcctgggtgacagagcaagactctgtctcaaaacaaaaaacaaaacaaaacaaagaaacaaaaagaattcttgccggacaggcatggtggctcacacctgtaatcccagaactttgggaggctaaggcaggcagatcacttgaagccaggagttcgagaccagcctggacaacatggtgaaaccccatctctactgaaaatacaaaaatcagccatgcgtggtggtgtgcacctgtaatctcagctactcaggaggctgaggcaggagaatcatttgaatccgggaggcagaggtcacagtgaaccgagatcacaccactgcactctagcctgggtgacagagtgagactctgtctcaaaaaaaaaaaaaaaattgttgccattgatttccaagatacacaaataacagtctcaaaagaccttttgagatctgcaagagccaggctttctgaggcaggaagtaataatggccacgtttatagtgcattttctataaagtggcacagctctgagccccttatatttagtccctgggatgagtctgacgtaggtgctgttgtctccattatatggttgggaaaccaaagcacagagaagggaattaacttgcccaagtcacacagcagagctgaggcttgagcccaagcagtccggctccagatcccatgcctttgggtggtgtttgcatccagtggtctggctttgaatctctagagccaaaagggatgaccctgaccctgacccccccaaaaatgggccagggaggcctgtgctgggaatggaggaggaacttagaggtgaaaggatggggatgcaccttccccccgacactcttatgagagcacctggcacacagttgggagggaggggtgctcaggtagcatctgctggacaggctgcctgtgcagcatcagggacccagaagagaaagggactcagagcctcaatattgccccttaaatccatcctaaaacctggtccctctcctgctcaagcacctcccatagctccttattgcccacatgataaagtccattgttgggctctgaacctgcgatccatgtggtcagccagagaggcagtcagggtcttggcttcagagaccctgccccacttccacccacacacaccctggatccttgcagtccccaagcagcccctgctggctttagatgagactcaggcagaggtgacaaacattttattcctgggaatctgcaaaggtgggtgggtggggttagggtggatccctgcaggcctcagctcagtggctccaccagcagctaaagtccgccctccgcatgcatgatcagctctggcttcctgccgggctccatgtggtgccgcaggaagcggaagcccagcagcgtgagtgccaggaccaccttcatctcggccacggcgaacacctgccccatgcagatcctgcgggcagatgagaggactctgactgtgcccaagacccgcatcctggccccatcctggcaccatcccccaaaccaggcacagctctgagaggattactgtctgcaaaatagaaaagcaatgctgcaaaatgaaataaatatacattagatatatagcctaagttatgtcacattcatttctctttgcctttagagttcatagttaaatttttcattccaaaatgatgaatattcccataaaaaagacaagtaagcaaaagtaagaaatagaagttatccacaatcccatgtcaaaataagcactgtaaatattctctcacacgtccaggttttttatttatatgtaatctttttatctgggaaaatgcttattaatatctaaatttattacatttacgtgcaatatttttgtttaaaaatgctattttaggctgggtgtggtggctcatgcctgtaatcccagcactttgggaggctgaggcaggtggatcacgaggtcaagagatggagaccatcctggccaacatggtgaaaccccgtctctacaaaaaatacaaaaattagctgggtgtggtggcacactcctgtagtcccagctactcggaaggctgaggcaggagaatcgcttgaacccaggaggcagaggttgcagtgagctgagatcacaccactgtactccaacctggccacagagtgagactctatctaaaacaaaaaatgctattttatattttattttattttattttattttattttattttattttattttattttattttattttattttattttttgagacagtctcactctgttgcccaggctggaatgtggtggcgcaatcttggctcactgcaaccgccactacccaggttcaagtgattctcctgccttagcctcccaaccagctgagactacaggcatgcaccaccacgcctggctacatattttgtatttttagtagagacagggtttcgccatgttggccaggctggtctcaaactcgtggcctcaagtgatccacccacctcggcttcccaaaatgaattacaggtgtgagccactgcgttcagcctgaaaatgctgttttaaacactgggaagcacaggaaaaggtgctcaacattatttgtcattagagacaagcaaatcagaaccacagtgtgatgcttcttcacagcccctaggatggctggaatctaaacatgggaaaataacaaacatcagctagtatgaaagtgaggctaagagaagaactgttttaagattgaggaaatatagcattatatgtattccaacaggaatgatcaaatagagtgtaggatacacggtcaataaacaaaactcaattatatttctacatcccacatatttcactgttacaggtaagaactctttggccgggcatggtggctcgcacctgtaatcccagcactttgggaagccgagtctggcggatcacttgagcccaagagttcaagaccagcctggccaacatggtgaaacctcatctctactaaaaatgcaaaaattagccgggcatggtggcatgcccctgtaatcccggctactcaggaggctgaggcatgggaattgcttgaacctgggaggtggaggttgcagtgagccaagattgcaccactgcattctagcctgggtgacagagcgagaatctgtcttaaaaaaaaaaaaaacaccaaaacaacaacaacaaaaacaaacaaacaaaaaaacaaacaaacaaaaacctgtttgcctaacctgtatatcccagggatacagaaatatttcaacccccgggacatagggattaggcaaagagttcttaaatataatggcgtaaaagtaatccacaaaaaacaaaattgataaagggtacttcataaacattaaaacctttcgctctataaaagaaacttcagggctgggctcggtggctcacacctgtaatcccagcactgtgggagactgaggcaggtgtgttagatatgagttctaaatttcttttcaaagaatcaatatgtcaggatgttcaattctttgccttctacttttaaatttaacttcctcataaagcagccttttcggattacctgttccaccctgactcattcctattacctactccaccgtgactcattctgattacctgctctgtcataaccatttttcccgccaaaccactcatcccaccactctctttaaattagccaatcggaattagtttagcctgtgtggtctaaccctagccaataggggaacgacacagcagcaggggccacatgcatcaaggataagaaccccttcccctcccttgtccaagtgtgagctcaccattgctccatctgtaagggcgcacccttctatagaagtacctttccttgctgagaattaaaaagaaaattttatattcgagtgatatttcttttgcggcaccaaaactttacttataacaggtggatcacctgaggtcaggagttcgagaccagcctggtcaacaacgtgaaacctcgtctatactaaaaatacaaaaactagcggggcatggtggcaggcacctatagtcccaaggctgagacaggagaattgcttgaactcaggagatggagattgcagtgagccaagatggcgccactgcactccagctggggcgacagagtgagactctgtcttaaaaaggaaaaaaaaaaagaaaagaaaaaaaacagataatgaaaaggctagccgcagactaggggaaaatacttgcaaatcacacatctgacaaaagacttgtctgcaaaatataatctataaagaactctcaaaatccaaaaataagaaagcaaacaacccaaggaaaattaatggacaaaagattagaacagacactttaccaaagaaaatacaaagaaggcacatgaaaagatggagaaatgcagactaaaatctctgtgacataccgcagcatacccacaaggaagactggaaaaaaaaactgacactatcaagtacaggtgagtatttggaggaactagaattctcataccaatacaggagctagaaagaaattattttggcagatagtgaggataagacagttatcagtaaggtttccttttcataaaaagcagcccccaagtcatttcttttctaacaaaaagcagcctgaaatatcaagctgcaagcacagataagcaagctggaagtttacatgggtaaatgccggcagctgtgccaatagaaaagggatatctggaagccaggtgtattcaacttggaggtttcctcttcccttttctttgtcaccatgtgtgtagtgaaaagcaggcaacaggtagaaaaagcaccggccaggtagagacccctatctgcataataaaagatcagggtgggatagccagcttcctcccatgctatgcaaacagcacacctggtctgaccaatctttcatgccctatgtaaatcaggcactgcctcctcaagcttgtctataaaaccccatgcgtttcaccacaaaaccacaagacccattcaggagcccctctttctctgcagaagagagagcttttctcttttctctcgcctattaaacctccactcttttttttatttttattttttgagatggagttttgctcttgttgcccaggctagagtgcaatggtgcgatctcagcttgctgcaacctctgcctcctgggttcaagtgattctcctgcctcagcctcccgagtagcacactacaggtgtgcgccaccacacctggctaattttttgtatttttagtagagacagggttttgccatgttggtcaggctggtctcgaacccctgacctcaggtaatccacctgccccagcctcccaaagtgctggattacaggcatgagccactgcgctcagcctaaacctcaactcttaagcttacttcttgtgtgtcggtgtccttgatttccttgatgtgagatgatgaacattgggtatttaccccagacaacaacgccacttcaatacattcctgataggaattaaaaatgacatggaccttttggaaacagtttgatagtttctcatcatggtaaacatacactgataatatgccccagccatcccattctaacagcaatgggaatttagtttccctgaagaacctgtgtacaaatatccataacagttttattcataatatccaaaaaccagaaacaatccacttgcccttcagccactgaacaaagagtgtcctatccatgcccagaaattctacccagcaataagaggaaacaaggttttgatacagacaacatgggagactctcagatgctttatactaagtgaaagcagcaagactcctaggctcccaatggcataaccccattcacacaactataggaagaaagcaaatctatgggaagacagaaaacagcagtggttttcaggggtcaggagtggaaggaggtttttgaccaccaagggtggctgtggcagtagtggttacatgactctagccatgtgtcaaaactctgaactatctcacgcctgtaatcccagcactttgggaggctgagggggcagatcacctgaggtcaggagtttgagaccagcctggccaacatggcaaaaccccatctctattaaaaatacaaaaattagccgggtgtggtggtgtgcacctgtaattccagttacttgggaggctgaggcgggagaaccgcttgaacccaggaggtggaggttgcagtgagctgagattgcaccactgtactccagcctgggtgacagaatgagactctgtctcaaaaaacaaactgaactaagcaccaaagaaaacaaattctgaaaatttaatgtgattttaagatgagccatgaaaatacaggagtggcaagtaagcacactcattgtaatgtaggcatgctaatatgtaattagggtgactaattacatatattgtttggctaaatatactatgaaaggatgcactaggtgtgaaagtatttacctttatacacatgaagaaactgggcagatgaagggcatatgtagcaccattacttctcactgggtattttattttttacacgagtgaatgtacttctggtcaacaatattatatttaaaaacttggggctgggtgcagtggctcacgcctgtaaccccagcactttgggaggccagggcaggtggatcatctgaggtcaggagttcaagaccagcctggccaacatggtgtaaccccgtctctactaaaaatacaaaaaattagctgggtgcggtagagcgtacctgcaatttcagctactcgggaggctgaggcaggagaatcgctggaacccggaaggcagaggtttcagtgagccaagattgtgccactgcactccagcctgggcgacatagtgagactccatctcaaaaaaaaaaaatcgggactgggaggaggggctcacacctttaatgccatcactttggccaggagtttgaggttgcagtgagctatgattgtgccactgcactctagcctgagagactgagggagactctgtctcaaaaagacaaaatgaattaaaaaagaaaaagaaaaagaaaaagaaacaaaaaacaaaacaaagcaaatgtaggcaccacctgtcaaagagtctcatctactcagtctagagtctgtaggggttcccaggtaatctgatgtgcctagggctgagactcgctttgaaaatcatgtccttgatacgataaggcatgacctctgatgccaactgctcagattcacccctgactccacccttcactgagtgaccttgaacaagtgagttcatctacaatctgtaagatcgatgtgaggatgaaatcagcatttacctgggggagctgaaaagtcaccttctcccttctcagtgatctacttctgttaatacgaccaaaatattcagtgtctgtggaatttccagatcataactgttctatgaaaggtgtctaaccacacctgtatcttacatgaatatttgtgcatctattgctgtgaaaatgagatctctaccccaaaagttacttgatgaagaataactcaatttgttactaatagtcaatgtatatgaagctaattcttacaaagtgagacaaaacacttttattttctaatatgatgtctttttttaaattaagactgatttgaacacttaacacacacattttgaggaccacaaaataatgtttcctaagatgatttaatgtcatggaaagatgctcacagcatattattatatgaacaacctggacagaaaaaaaatgtatgtgagataaaatagcaaatttttttgattgaggtagaattcacataccacgaaattcaccatttcaaagtgtccaattcaatagcatttagtgcactcacagtgtcgtgctaccttcgtcactatctaggtccggaacattttcaccatcccgggaggaaaccccatactgattagcagtcgctcctcagtcccacctccccacagctgctgaaagccaccaatccgctatgcatctcttcagattggcctgttctggaaatttcgtataaaaggacagtacactatgtgaccttttgcatctgacgtctttcattcagtatcatgcattcaaggttcatccacagtgtagtagggatcactgcttcattcctttttatggctgtgtaatactccattgtatggatggaccacattttgtttatcctttcatctggtaatatatagcttggggttgttttcatcgtttggctactgtgaatagggccgccatgaacattcacgcacaagcgtctttctgtttgaacacttgtctcaattattttgagtagatatctaggatggaatacaggactgtggaacagggtcttagggtaattctaggcttcacttttgatgaatcaggggtcattttagtggggtcagagtgggtctctgcagaactcagctcaggggctccacccgcagccaaagtccgccctctgcgcgcaggaccagctccggcttcctgcggggctcggtgtggtcaggcaggacgcggaagcgcagcagcgtgagcgccaggaccaccttcatctccgccatcgcgaacgtctgcccgatgcagttcctaggggagggaggtgggaactctgactgcacccaggagccccatcctggccccatcaagccggtaacctggcctgggacacccaaccccacctagagcagtttgaggaatagagaagggggtatccgtgcctggatccccatgcgggcttgcatatcctgcaagcctagccgagctccaacccccagcctagaccaaggtggggtaggagggggctctgagcacaccacagacccttctaggaccaacccaaccgtactctatggaccttttcctataaactccagaggaggtgagggaaagagagctggaacttggaccatctacaatgtcccccttttccccactgtcatgcccagacccctgcacccatcaacccgttcccacctcagacacaggccgcccttacctgggccctgccgagaagggaataaaagccagaggtgacctctccttgatgttctctgggtcaaagcgaaaggggtcgtagacctggaggtgagaccaagaagggttgttgggtggggtctcccagtccgccagccttggagagacagacagttgtgtgtgtctttgagggaggtgatgttggatactcctgatcaaaaccctgccccctcctctaggagccttggaatggacaaaaacagagagaggggccccgcacctcagggtccggccacacagctgggttgtgatgggttccgaaaacactgatgaggcagataatgcctgtgggagagaagggagcagtcaggagaaggcctccttcactgaggggcccctcttcctacccaggagactcctccccgtgaggctgtgagcacctttggggatgacccggccgtctgggagcacaatgtcctgggtgacatggcgggagatgaccgggactgggggatgcagccgcaggctctccttcatgcacatggtcaggaagggcaaatgggccaggtcgtccctaaggaaacaccccagccccaatccttatcaagggagcaaagacacaattctccagcttctctctgtttgcaagtgagaccttttctccccgcaataaaataaacttttaacaagaattgttacaaagtcgcaagaataaaaatagtgtggcactgtggcaaaaatgagaaaacagacccatggaacatgagggagagctcagaaaaagacatgagaataagtgaaaacttcacatttgataaagacagcccctgctcaaaccaaaatcctgggaaactgatggattttacagttgtaaaagaaaaaagtggatcaatttaacttcacagaagttgaatatgctcaagatggtagtttttgcagataaaggatagtaatgaaaagtaccctccaaaagttgaaaggcaatattttgcaacccaagacagaaaaaaaaaaatcaattttggctgggcgtggtggctcatgcctgtaatcccagcactttgggaggctaaggcaggtggatcacaacatgaggagatcgagaccatcctagctaacacagtgaaaccccgtctctactaaaaatacaaaaacttagcggggtatggtggagggcacctgtagtcccagctactcgggaggctgaggcaagagaatggcttgaacctgggaggtggaggttgcagtgagctgagatcacaccactgcactccaacctgggcgatagagactgcatctcaaaaaaaaaaaatcaattttaatacacattcttaaaagtaaatatttttaaagaatccaaagaaaaagagcaaaaaaataaaggaaccacttccataaaaagaaacaaacatcaacacgtgaaagagatgttcaacctcactcttatttaaaacaatgtccatcaaaagaagaaatatgaagattggcatagattttaaaatttaataatacattagtagtattggtaaagttatgggaaaacttgtgccatcaaactcagctaataggaaaggatttgcaatgataattaaaattgtacagtgcaaatgttctttgattcagcaattgcacttcagggaatttgtcctgcagagatgcttatacatgcaaggaatggtcactgtgcacacatgctgactgcctcatgtccacttttagcaaaaggttggaaacaagccacatacacattgatgggaagatgtttagataaacagccacacgatggaatactatacagctacacaaaaggaggaaatagggatcactagtctcatcacattctgcaggctggaaggtaaatcagtacagacactgtggaaggcaaattggaaatatctactataactgaaaatgtttatgtgcattcaacataggaatgagctgaataaataaggaataaaatatttagcattcagaaaaaaatagcattaagacacactgtcgagtgaaaacaagttacaaatatatacatttgtgcacataaaaagggcaaaaagtatatgaatatatatttatgaaattaatgattcagagatagatgatagattgatagatgacagataataaataagagatatagagagatagagaatagacagatacatacatagatgatagaaacagagatacatagatgatatatagatagtagataggtatatagatacatagatagatgatggatagatagatagatagatagatagatagatagatagataacaaatctatggctctggagacacctttggagaatgagaaaggattaggtggggtggcaggattgtcaaggaaaaagctagtcttatctgtaatatctcatttggtgcaagaagaatctgttcttatcactggttttataatttaatgctcattttccatgtggtgtgtatatacaatggaataccattcagccttaaaaaaaaaaaaagaaagaaaacttattttgtttgccacaacatgaaagaacctggaggaacttatgctaagtgaagtaagctaggctcagaaacacaaacacacatgatcttacttatcttgggacctaaaatagtcaagctcatagaaacaggagtggaggtcgggcgcggtggctcacgcctgtaatcccagcactttgggaggccaagggcggcagatcacaaggtcaggagttcaagaccagcctgtccaatatggtgaaaccccgtctctaataaaaatacaaaaaaattagccaagcgtggttgcgggagcctgtaatcccagctactcaggaggctgaggcaggagaatcacttgaacctgggaggcagaggtcgcagtaagctgagatcgtgccactgcactccagcctgggtgacagagcgagactccatctcaaaaatgaaaaaaaaaagaaagaaagaaaagaaaagaaatagaagcagaatgatggttaccagaggccagggctgagggagggatagagaagggtgagatgttggtcaaaggatagaagcttcagttagacaagaggaatagtttttgagatctactgcacagcatggtgatttagtgaacaatgtattaattgaaattgctaagagagtaaatttcaaatgttctcaacataaaaatgataaatatatgaagtgatggatttgttcattaccttgatttaataatttcaggttgtatacatacatcataacatcacattgtacctctaatatatatatgttctcaacataaaaatgataaatatatgaagtgatggatttgttcattaccttgatttaataatttcaggttgtatacatacatcataacatcacattgtacctctaatatatataattaaaatttatcaatgaaagaacaatttaaaaacaaactcatttttgaaaactcgtattttaagaaaaatagatctcagagataatgtccagaactgcgtctattttgtatagttttctttacaaagaaaaacacagtatgtgttcatataaataaaaatcacagtgtgaattcatataaatgtgggcattgggatagccattttctggaagaatacacagaaaactgttgaccatagtcactgctaaggtggagcttaataaggaagctcatttttatcataaaattttttggaccctttcttttaaccacatccataattttgcttgaaatctggattttatactccaggacatgggtccaggcaaagattttctgtgttaagacctcaaaagcacaggcaatagacaaatgagattacatcaaggtaaaaagcttctgcacagcaaaggaaacagtcaacaaagtgaagaatcaacttacagaatggcagaaaatattctcaaattactcatctgacaagcgattaataaccagaatatattatataaggagctcaaataactcaataggggaaaaagaactcaaatcatcttatttaaaaatggtcaaaagatctgaatagacatttcttaaaataagacatacaaatggccaacagatagatggaaaaatgctcaatgtcactaatcatcagagaaatgcaaatcaaaaccacaatgagatatcatctcatcccagttaaaatggcttttatcaaaaagacaggcaacgatagacactggtgaggatatggagaaaggggaactctcacacactgttggcaggaatataaattagcgcagccactgcagagaacagcacagaggttcctcaagaaactaaaagtagaactaacatataacccagaaattccactactgaaaagaaagagaagaaatttctatcccaaagaaagaaaataaaactgttgaagagatatctatacttccgtatttattgcagcactattcaaaacagccaaaatatggaatcaacctaagtgcccatcaactgaatggataaagaaaatgtggcggccgggtgcggtggctcatgcctgtaatcccagcactttgggaggccgaggcaggcagatcatgaggtcaggagttcgagaccagcctggccaatatggtgaaaccccagccctattaaaaatacaaaaattagccaggcatggtggtgtgcacccatagtcccagctgcttgggaggctgaggcagaagaatagcttgaacccgggaggcagaggttgcagtgagccaagatcgtgccaccgcacttcagcctgggcgacagaacaagactctgtctcaaagaaagaaagaaaggaaagaagaaagagagaaagagagagagggagggagggaggaaggaaggaaggaagaaaggaaatgtggcatgtatacacaatggaatactatgcaccattaaaaacactggaattttgtcatttgtggcaacatggatggaactggaggtcactgtggtaagtaaataagccaaaaagagaaagacaaatatcgcatgttctcactcacatgtgggagctgaaaaagtggatctcatgaaagtagaaggtagattggtagaagggagggaggggtgaggagaagttgattaacgggcataaataagaggtttgataggagaaataaaacctagcacttgatagatcagtgggttcactatagtttacgatatgtactgtatattcctaaatagttagcttatgttagttatgtttctagcataaagaaaagactaaatatttcaggcgacagatatcccaagtacactgatttgatctttaccagttatatgaatgtattagattatcacatgtatttcaaatctatgtgcatctatttatgcagcaataaaaaattgtttgttaaaaatgcagaaaaattattggttttaaaagcagaaaaatgtttctcctcctcactggactgctgtgctgggcaaaggtgtggacgagaggacactgaatccaagacatccgtccattccaatgcttcctctccttcctccagcccctggcctggctctggtctcagaatgtccccactgtgccttcattctacagctggtcctctccagtacgccctccacactagccctagaaagatcttcctggtacccagatgtgacctgtccctacactgctcaaacacttcccatggctccctattgccattgggctaaaactgaagccattaacattttccccaaggcttccacagccagcccctgctaccatctccggttttatcatctcattacaactcagtctctccctctctctccccttctcctcctttctgtcctgaccctgctctctctctctctccttctctctctctccctcgctctcctctctctcttcctccctctctcttcctcccccaaagaccccaggcagtcttcttgacctagagcactgccccccaactgtacccaattatctactgatcattatttaggctctcaactgagacactttctataccccctagtcctgcttctcttactgtaaatcccatctctgcccatgtgggctgggagtgtcctgcccagggacagctccaccaccaggctgggagcacctggaaaacagatccctgggttggttccttcccaggtctccagagcacagaaagatgctgtgcacagatgtgggggtgaaaatgcagtgtgggagtgtttgctgaataaggatgggacggatgaacagtgcaagtgttccggacaagaatggatgaattttacccctaggtctcccttataaaaccctggactcgactggagagtaggaattagggaacagaagagcaaacattcaagaagtgaagatgttcaaaaaaaatgatatttctgggaggaaaggaagagagtggaggggaagttcatttgctgaacacgtctaagtggcgttatctgtcctcacatatcatcaccaactctctcagaagcccaggtctttctgtcctaagggcctataacctttccccagacagtcaggatgggtactaagtcctgcctgtggtcctctgctcctattcccactaggcaatagtggcagaatcaacaaaaacagcttttcctcccctccccacctggggagcagagccaatgagaaggtctcaggaagaggccacaagcacctgcactcaccattcaatctctttaggctcacggtccttcagaagttcttgcacctcctgccggcagcgctcctggtattctgggtgctttgcaaggtggtacaggacccaggagagaccactggccgtggtgtcatggcctggggggcagcaaggcaggcttgggtctctgggctgcttcagcacccgaaggtagacagcacccatgcattgagggcctcagggaggatgggggaagggggatgggaaggttgtgggggtctacccaccctgttcctggaagggagagatcccggtcccctctctagccccacactggggccctcaccctcaaacataaaggtgtcagcttctgctcttatgtcctcatcagataacttcttcccgtcttcatcctggagagaaggcagtaaccccccccaacccccacccccataaaaagtcacactagctctaagggctcttgagtctaatctgagacagtctctgaagattcatcctttttccagaaatccaagtccatcttgcactcctagacccctcttggtcaccatggccagagccctcacctcatggccttcctctctggcttccttgcctcctcttgggttcctactgggaagactcaatgacccatgaatattttaatgaaaagtttctgagaaaaagttactggcaacctgagttacaggagaattaaatggcaatttcccttggaaattagagattaagtattgcttcaaagatttgcccacattctagagtgataaatctagagaatcttatccccctggagacgtttgggttgtaaggctaaggactatggcatctcactgaagaggatttgtttatgctccagaacaaagcacaccatctctcacaaagctaccattctcactcaatctctctctctctctttctctgtctctctcattctctttcttgggaagaaatagaaaatgtgccaagactcataatgtagggcccctctcttaggatgcaaactctgctgcacatacaagtgaaaacattacccttggagaaatttgacttgaggatgaagagccagtgccacaatcccactctggctaacagtattgctgtgagcaagacatgggctgctctgatctagaggtttaatgcatctgtcacaatagacctacacatagacaaagacatagacacagacacaaacacacatagacaaagtcatagacttagaaactgacacagacacacaaatacacataaacatagacataacacagatatagacacagacacacacacataaagtcacagacttagaaacacaaacacacaaatacaaataaacatagacatagacacagatatagacacaggcacacacatatagactaagtcacagacttagaaacacagacacacaaatacacgtaaacatagacatagacacagatatagacacagacatacgcacacatacacaaaaacacagacttagaaacacagacacacataaacatagacatagacacacacacacatagacaaagtcacagacttagaaacacagacacataaatacacataaacatagacatagacacagatatagacacagacacacacacatagataaagtcacagacttagaaacacagacacacaaatacacgtaaacctagacatagacacagatatagacacagacacacacacacatagactaagtcacagacttagaaacatggacacacaaatacacataaacatagacatagacacagatatagacacaggcacacacatatagactaagtcacagacttagaaacacagacacacaaatacacgtaaacatagacatagacacagatatagacacagacatacacacacatacacaaaatcacagacttagaaacacaaacacacataaacatagacatagacacagacacacgcacacatagactaagtcacagacttagaaacacaggcacacaaatacacataaacctagacatagacacagatatagacacagacacacacacacatagacaaagtcacagacttagaaacacagacacacaaatacacgtaaacatagacatagacacagatatagatatagacacagacacacacacacatagactgtcacagacttagaaacatggacacacaaatacacataaacacagacatagacacagacacaaacacacatagatgaagtcacagatttagaaacacagacacacaaatacacataaacaaacatagacatagacacacacacatagacaaagtcacagacttagaaacacaggcacacaaatacaaatacacataaacatagacacagatagacacagacgcacacacatagatgaagtcacagacttagaaacacagacacacaaatacacataaacatagacatagacacagacacacacgcacatagacaaagtcacaaacttagaaacacagacacacaagtacacataaacatagacatagacacagatatagatacagacgcacacacatagatgaagtcacagacttagaaacacagacacacaaatacaaatacacatagacatagacacagacacacacgcacatagacaaagtcacagacttagaaacacagacacacaagtacacataaacatagacatagacacagatatagacacagacgcacacatacatagactaagtcacagacttagaaacacagacacaaaaatacacataaacatagacatgacacacactcagacacaactactgatagacataaacatagacatagacagaaacagacacaagcacaggcacagacaaagatatagacatagcattgacatagacatagccatagacgaagacatagtcatagacacagacaaaaaacatggacatagacatacactgagacaaagacacaaacacagaaaaaagacaaaggcatagacgcagacacagatatacacatacacatagacatggatgaaaatatagacagagacaaagacataaacagagacatagaaaagacaggacaaaggcgtagacatagacaaagatgaagacatagataaaaagacatacagatatggccaattacaaagacaaagacatacacatagtcacagtcatagagacacaaactcaaacagagacaaagatatagaaagacataggcaaaaacataaacatagaccagacatagatatagatgtagatgtatggagttaaatgtggacaattaactcattagtttgtaaatagagcaaactctcagacttgtcagtttcaagcctagcagctccctgctaggtgcactccacagtcatctctaaaacctatctctgacctgtccctcccttcctcaatcaccttccatggctccctagtgccctcttaatcaagttcaaatcctttcatctgacatttcacatgaagctcccttctacttcttgaattcagatcccagagaggcccaccttgctcagcaggagtacatcaatgaagtccaaagtcttggatttggccttggcttggaggaagtcatcaacaccctggctagggagagtgcggcgccgctcctggatgacggcatctgtgaagtcgtgcaccaggcggcaggccctgcggaaacgctgcccatcaggggtgagataatacaggaagtcaatatgcaggaggatctcatggtgtctttttgatacaagggcactgagctccaagatggcggcaatatattcactgggtttcctgcaggataagggcagaaagggaggcaacaatttaatatacctgaagccccaggatcacctcccaccagcagccaggatctacctcctatcagtaaacagagtatccaggaacagatgaccccacagatacagggtggggatcagcatgagattgattctccaagctctcttctctccctgcatcccatctctgtgagatgcctccatgccgctaggcacccagagcatagcttgcacattattctcctattctctctttccctcccagtatacagtcctgacccgtctccttgaaactgtccacaaagctcagactttatcctcctgcaactggtccatggtctagctttcaccctagcctctttgcatcagtgttaactccatttagtgctacattagtcagtcccctacagagctctgaccacacccaccagttcaaaccccttcaatggctccctggaaacctcaagataaagttcataccagtccttcaatgatcaggtataacaaaactcctccaggaaggtttgtctggtttccctgcttagtcctccctctcccacctacccactttgggtccacagcccaagatcccagatcctgggcaagaacttactcctgacaatggctgtcaaagctgaagacacatttctgtagactgtccaaggtcatgaggctgatgtgctcaaacatatccaaacaggcactaccctctgaggccaggagctgccacttggcctagccagagaaggggacagagctggggcaggctccttgctcccttgagcacctctccaaccccaactgccaagatgggctccccagaataagcctcttcatcttctccccagggacccctccccagggagcaccaggttatggtgcaaacaaaagctgttactattaagagatgaagacccaagattgggagttaggagaactaggttcaagttccagctctgtcccctgtgctctgtgtgccattagtcaactcattaccctcccctatatcctgcctgtcaaatcttcagaaacagttaagatgatgtgctttggagccatataattcacattagaaactctgctccacctcgccatgctcacttattagctgggtgaacttgggttagttccctaatctctcagacctgcagtttcatcatctaccatggggcaaaaatacataatctctccttcgcagagctgttaaaatcaaattagacaatacatactcgtatcatggaatgggcacatggcattgtttctggcatatggtatgtgatcaataaatgttggatttccccgtctgcattgttataaattgatttcaaaaatatccctgttttgggggaggtagtccttcgttgagtcctgagcattctttctgggcatgtcatgaatgcaagacactgatgtccttaacatggaaaatttctcagagttgtgtttgcgaagaaaaactttgagggataaggtaaagactccctctagacatgttgcttttgctttctataaaagcagattccctaagcttaaagctcctcttctgtaatgcaatatatgatgtcagcaggcacttatagaagcccacctgtgtcagcccatgggatttgggaagcttggagggaaaaaaggcaatctaacaagaaacacatgctgctgtctgtgtcatgagtagtaaactatcctttgtctctgacccaggagtctctcgtccttctggaagaatttatgaaacagtaacaagctaacttatcaatttgcaagttaaaaaaaaaatcctagatacttcgcaaaacctttgccacaattcttcccttcctgccatatccacaccctttgcaatgtgatttttcagcaactcccattaatagacagagcctattttatccccctgcctttgattctgtgttggacttttggctttcgatgtcaaaatacaatgtggtgaaaatgatgagttaataactaacgaagctaagccttgtcttactccttggaaccctgcctgcattgtgaaccatggcgcgccttctggaaggagacaatcatagggaggaacatccaggggtcccagatgaggccaaacctagacacgtgagagaacccaaacatgtcccagccaaaacccaaacatgtggcagaattcagtcaacacctgcaaggctgcctacctgacccccagctgctcatgtaccatgagtggtcccttccatatacagaagaacctgccaactgtcccaaagacttattagcaaacataaacacttattggtttaaaccaatgagttttcaggtggtttcttatcagcaacagctactatgaaattgttgtcatgaccctcttgtgtttacagggctttggtgatggaaacatagaaacagacaccttctgggcacctgctatgcaccagagacgtgactccattacattactctgaccatcttttaagtagggattattatccccattttacagatgaggaaaccaaggctcagtgagaaagagcaatggcccaatggcacccagcagagccaaaactccagactagatctctctgttgtcctttcaccccaaggctgcaagtgggaccttggcttcaaataactcacgtgcatgatgttcacactctcattgaaaatcttcatatagggcttcaggatgttgaaatggaaggcaggcgtcagcatccgacggtggcggctccacttgtcaccagcactcagcaggagcccatcccctagcagggcagccaagggccatgggcaaggacctctccctcccctggccccccaacgtttttcccaaccctgttcacctgcagatactcacccagccagggctccaggaagctgtagaagaacttgtcctttggtgcaatggcagctgacataaatgaggacaatcaggggccatggaggcaggtgaaagagggactttgggggtgggtggaggctcccagcaagaggtttgcacttctcccactctgagccccacatagcaggaagagggccaagggcagaggaagaagggaggatggggaggggagggaagaccagaccaggctacagcagcacagtacagcaatgacactgcctaacatggcgtgtaggagctatgtcagggttccagcatgccttgacatgcctcctacacgatccaacatgttccgcaacccctgagcacagctcagcattctacagaatgcttcacaaggacctaggacaccctgtctgtcccagcactctctgacatcttctgatatggcatcttctgacatggacctggacatgagacatgaccctgacatgtgttcacatgtcctgacatggccacaaaatacatgacaattcctaacatgagatggtgtgctctaacatgcacatgagatggtctaacatgatcttaaaagcgtgttccacatacaggctctgggttgaatataaatatggtacctttaatgtcacagacatagccaacatgtgaaccagactgttcctcaggcatgacccaaatatactataacacatgcctcagacaagactcaaataatgtctcagacagttcacatagggaccctgggtcccagacctcacacaacccccagacctcacacaacgcccagatgtttggaccaccaggagaaaacggcagtgtcaaacagcacctgagacaagaaccaaacaggccctcacatgccccaaatgtccttggccacagataagccccaaacttgaccagctctacatgaccccagttggaattatataccagatgtaaccaggtataacatatttcaggtgtaaccaggacccaggtgtaaatatacaaggcagacctggccatataacagccattgtagagacacgccccagacatgagcaaacagcaacagaggttagacaggtggaagtccaggggcgatggaggcaatggcatctccaccacagcccctcctgtctgcacatcggtcacgtgttcagctggaggcagcacagcaaccccagctgtgggcaaagcttggccagtgcgatgtctacctggagcaaagagcacaggcttgatgcacgtggggagaaagatgtggatgactgcctgccagggccccacccaccagcagcccatatccccaaaggtgcacgccaggctttgtgtgtataggagaccttcttctgagctgtgaatctggagaaaaacacacaggacccaattcatgctctcctaggctgtgagagagaaggatctgcagggaagaggtcgaagccctctccctgagaatttcaagcagcatctcatcctcctgtcagtgctgagcaccccctgcctcctcacatcctccatgcaggactctccagtccttcagttacacagacagaaaaggtctttccccatgtggatccacacaccatgttccctgggctctcattcatcccattttccagatgaagagcctgaggctctgaacaataaagtcacttgcccacagtcccagaccacggcaagcctgaggcctaagactaggtctgtctgcacccatggcctgaatccttaaccaacaaacttctttgtgcccccaaaacagtagctctggaagacccaggcctaccaagactgggcaatcagagacacagggattgggtgaaaaattggtcctgtgatccaggccaggagaagtaaaccatgggccatttctgggaactctaggggaaaggtggcctttcccataagaactgagcttctgggactcatcgttgacatcatgaggaaaaggccaccttgataggaaaagcgacatggagaaagctaaagccaagagagaaagacagatttccagtgaccttgtgtgagacctggatccagccatgcctgaaggccaccctccctggactttaaagtcaatagattatctttctttgcttagaccacaccaggttgggtttccaccactcacaactgaaagagacttcaataaccagagacagctgggtaccagcccagagtcactcagcattttgaggtcagagccatggtctctgtaggatgctgcccattccccctgctcagcctcgcccgtccaacgatgggaagcacaggggtcaaggaaagggacccaagctggggtggagtctcctcttggagatccccgggacctgcagcaggagagcaacgaacttagggcagacaagctataggatggggtaaagggaattgacccaccagaggtggacatcatggaagtagcagcccagatcccccaccagccacaagtcctcctcattgttctaggctttgggacaggcaaggtgatgctaggcctggcaaggggccttgaatactaacgatgtccaattgcctcaccctgcactctcctttcaaacattcctactcattgttccagacacagctccagtaactcctcctctaggaagccttccagcctgccccagcagagaccttgttcttccctgggctgtgatccatctccctctggccctttcctgatcccatgaagttggggatatctctatccaggtccatctccttaaagttgggggttcctccaggactgggccttgggttgaggtctcttagggttccagggcagcccagaacaccagaacagggggtagatggcaatagagagaggagacgctgagatggaaattgatgaatacatgaaagaaagatgaagatagctgagagggaaggaaaggagaggccagagtactgcagggcccacacaggagcttggggatagcggaagtgcaggcctcaaatgcactgccccaccagctgttccagatggtacctgaggcgttgatgacagaccggatgatgtcggggtggcacaaactgaggaggggggagatgggtcccatccagaccttaaagccctgggggtaggtggccaccagctgagtcagaactctcatgccctcctctgtggggttgacctgcaagcaaggcaggggtcattaccttctgtgatagttaattctaggtgtctacttgactgggctaagggatgcccaggtagttggtcaaacattatttctgggtgtgtctaatctattcatcctatctatctaatttttctatctatatatctatctgcctacccatctatccatcaatccattttatctgtgctttcatccatccatatattcatctgtctgtctgcttatcatctattaatagccatctatccgtctaatctatccatcatatatatctactccatctgtctacataatctatccatcctatctactctatctacccatccatccatcatccatccatccatccatcctatctgtgcatccgtgtgtccatgcatccatatgtcctattatttgtctatctatctatccatccatccatccatccatccatccatccatccatgctatctgtgcatccatgtgtccatgcatccatctattctattatctatctacctacgtgcctgtccatccatccatccatccatctatccatcctatctgtgcatctatctatctatcctattagctatctatctatctatctatctatctatctatctatctatctacattcctcctgctctatctatctatctatccacattcctcctgctctatctctcttgggtccatctccaagtcccaagggtgcatcccagggcagagggagaagacgcactgtccactcacagaggcccagttatcttgagaggaaggattttctttttctgggagtcatttcagcccagaggcagctatatggggaggtcctcacaggggagatttgtggggagcagtatcgcctcaggacatgtccctaaggctggtccccacatgccttcatgtcctggctgatccacagaggctccagttcctcccatggagaaggttctgcacatgggagaccttcccttttcagcagccactagtggagcagaggtgactctaactgtccatcaggacaatggctcccacctgggagcagcttctgcagcaggctctgtgctagtgtgtcctgtgcacccttccactttatctgtggacacatccatcaatcctgccatttgcaaatgagcagactaagaccacattccccaaagaggagagcggtctaagtcagagggcaaggtcacggggaggagaaaggccaaggaaagcttctgaaaggtgaagtgagtggccaacttttatctgggtttggcaacaggtctcattgataagagggagataagaagaagaatataagagaaaggtgccttcgggtgtagtggaagtgggagacggcccatgcctctcctctggcccagctgtaccctcataacaggaaatagtccaggcaaggagaggaccctggacagtgggcataagaagcctcgagtccagcaatggagaatgtgggaatgccagggactcgcctctctgtgcagccaaccctctgcccaggagccccgcagaggtgcattaatgtgggaagacaggcaggaaaaggattcaatgcaggcctggagtgggaggacaaggaagtgagaagggcttgcgtaggcacctcacagaaatgaataagcagaggaatgagtaagatgcctcctctgcttctctgccaccccagatcccagcccaccccttcacccccactccctaagcctcgtacccctcaggaagtccatccatcctgagacctagacccatcctgctgccacactcaccatgccctggtgtccccaaaaccagttccgtcttgggggttgtgggaaacaccgaaggcggcggcagttgtcatagaaggcgtaggtccaggccaggacatgggccaggagccaggaggccccgaccagcaggaggagcagccaaggggatgctgccactggccagaggcccagccaggacaggctcagctgggacatcctgcagggcagacgggatggacggtgagatcctgaggcccagagaacggcccagggacctccagggacagtggagaggcagggacgggcagtgccggaggtagagcagggagggctcagggatgggtaaaaaggggctgagaggtaaagtccagaaaggcccaaccaaaaccagcagccaagtggcctccagttccctagtaagcacttagaatgggaaagagagagagagactgattaaagtccagaaaggcccagcctgaatcactgtgaggttgccaggggcttggtttcagttactcggaaaccacccatcctccaggccagcacccaggagctgcgtgggccttgggcagtgcccctctccatcccaggccaggaccccccccaggcctgccacccccagcctggcaccttctgtcaggagcagtctgtcccagacaacctcctctctctgtctgctgggaggcctttgaccctggcccttgatatagcaaaggctgtgggagggctggctgggttgggctgggccaaccaatccctgcagcctggatgtgtctcctgagcctgggcagccaatcaacacctggcgtcaggccagctgggtgcagaggaatcagctcagggtccagatggatgggtagatgcacagatagatagagtagataggatggatacattaggtagatagataaagtagatatagataatggatatattagacagatggatagatagctattaatagatgatagatagatacatagataataggataaatagatggaatggataaacgtacagctaagatggattgatggatggatgggtaggcaaatatatatatagatgagaaattagatagataggatgaatagattagatagacacacccagaaataatgttccatctctgtcccagatatgtgggatcctcatttgtgacatgggaactagggatcttggatcactccaatcactccagatgctacaaggccagtgacttactcagtatgatgctgaggaacatgaccatcagaaacaggatcagagtcactctcaagcaaaaaaaaaaaaaaaaaaaaaaaaaaaaaaaaaaaaaactccaaggattaaatgatttttcccattgtcctggggagaaattaatccaagggaggtcacaggagggcaaataattccccatcaccaccaccaccaccatgagcataccatcacccatggagttttctgatttactctttggcccattaagcgtgaaatttcttatgctaggtttctttctgataagggagaagagattagtatctctacatttcctctcctcctgctacctagtctctgtattctaggttaaattataatttatgttgaggatttacaatggctgatacacctagctgagccttctgcacagagatacattgggagtggaggttaattgggtcaaaggagaaatgccataagcccacactccagcctatcagggtggattaaaggtctgatttgcccaactcttgtcacacctgctcccactgagaggtgacagcatgctggcagtcctcacagccctcactcgctctcggcgcctcctctgcctgggctcccactttggcggcacttgaggagcccttcagcccaccgctgcactgtgggagcccctttcttttctcttcttttctttttttttggatttttttattattattattatactttaagttttagggtacatgcgcacaatgtgcaggttagttacatatgtatacatgtgccatgctggtgcgctgcacccactaactcgtcatctagcattaggtatatctcccaatgctatccctcccccctccccccaccccacaacagtccccagagtgtgatgttccccttcctgtgtccatatgttctcattgtgtagggacatggatgaaattggaaatcatcattctcagtaaactatcgcaagaacaaaaaaccaaacaccgcatattctcacttataggtgtaggagcccctttctaggctggccaaggccagagccggctccctcagcttgcagggaggtatggagggagaggcgcgagtacgaaccggggctgcgcgcggcacttgcgggccagctagagttccaggtgggcgtaggcttggcaggccccgcactcggagcagccggccggccctgccagccccgggcaatgaggggcttagcacccgggccagcggctgctcgggaaggtgtactcggtcccccagcagtgccagcccaccggcgctgcgctcgatttctcgccgggccttagctgccttcccgcggggcagggcccaggacctgcagcccgccatgcctgagcccccggcctccgtaggttcctgtgcagcccgagcctccccgatgagcgccgccccctgctccagggcgcccagtcccatcgaccacccaagggctgaggagtgcgagcgcacggcgcgggactggcaggcagctccacctgcagccccggtgcgggatccactgggtgaagccagctgggcttctgagtctggtggggacgtggagaacctttgtgtctagctcaaggattgtgaacgcaccaatcagcgccctgtcaaaacagaccacttggctctaccaatcagcaggacataggtagggccagataagagaataaaagcaggctgcccgagccagcagtggcaacccgctcaggcccccttccacattgtggaagctttgttctttcactctttgcaataaatcttgctgctgctcactctttaggttcacactgcttttatgagctgtaacactcaccgcgaaagtctgcagcttcactcctgagccagcgagaccacgaacccaccagaaggaagaaactccgaacacatctgaacatcagaaagaacaaactccagacgcgccaccttaagagctgtaacactcaccgcgagggtccgcggcttcattcttgaagtcagtgagaccaagaacccaccaattccggacacaccattgtctgagtaagtttgggtgccaggactatgaggtcgtgtgaagacttccagccccatacctgcagaacagtctgcagctcactctgctctgaactgccccaactttgcacagatattctccattcctcgaaatgaaactgtatccttcaaagctcacacatttcgcttattggctcagcgtagggagcaagttctctagatagcttactaccaaataaaatggtggagaagggaacccaggcagctgggcacaaaaaaggaatgagcaacaagcttcctctctgaacatgattttctgtgtaaggtcttggacactccctcgactgcttccagccatctgcctcatgctaggtttctagttaatgtggaatgaaaactctcacatcttccttctagatgtagctgtggtaattgcaacttaggcagttgtgcttgagaatcttcttcttaataccacatggcaaggtcattccccaatgcttttatttaccttcacttgaatttttatattaaacattggattgaacaagaacggagaagagaatcacaattattgtgtagatgctacattgtagttacattttctcttgtaattattacagtgctgggactattcgagctttaaaatcctttctgaagatcctaaagctactcagtggttctgctggcattaggggttgatatggtttgggtctgtctgtgtcccttcccaaatctcatgttgaattgtaatccccaatgctggatgtggcgcctggtgggaggtgtttggatcatgggggcggatccctcatggcttgatgtggtcttcgtgttagtgagttcttgcaagatatggttatttaaaactgtgtagcacctgaccctctctctcttgctcctgcttttgccaagtgatgtgcccgctcccactttgccttctaacacgagtaaaagctccctgaggcctccccagaaccagatgccactatgcttcctgtacagcctgcagaaccgtgatccagttaaacctcttttgtttacaaattacccagtctcaggtatttcctttttttttttttttttttttggtcttaaactccaagcctcaagcaattctcccaccttggcatcctaaaatgctgggattacaggcatgagccaccatacccagccaggtatttctttatagcaacacaagagtggcctaatacagagggatattgccaatgatttaatagtagtcttcttttctgtatgtcactctgcttgactaaccttaaacagtctctttaaataatttgtaagattcacctaactacacttttcatattgtccttcaatccttgcacttatggcataaacatgttttatgattattatataggtatttaaataatgcatatgggtcctatatttctctatcaatgttataatttttaccagctacataattttgaatcacatgtatataccatcatttaccttccatccatccaaaagatacgagaaggggaaagaaaagaataaaaggtaagtgctaatagataatccgaataggcctatatctattaaatcgattgaaacaataattaataaccttccaaaacagaaagccaagaccccaattggttcactgattaattctactagacttttttttttttgagggggtggcaaaagagctttatttacacactggcacaaggcccgccgggtgtcagctgaagaagtaggtggaacgcttcaccagctccaggtcgaaggcccctggcttgggcaccacctgcagtgtctccttcatctggctggcctccaagatcttctggggctcagagcagaaccgcctgaccaggaacctggacaggtcctgcaggatggactcgctgtgcaagcaaactgctcccggcacacctggttcatgatggagacatcagctgcatgggtccggtaacagtcgtgcacagagacgaaggtcaggcccttcctgtagcagtgcagggtggtgagcatcatgtgtgaggagtccagcgagtggatgaagttgggccggaagccgttcttctgcttaggtgtgttgggcttccggctgatgtctctgttgtgggtgtaagtgatgctctgaattccacctcctgattgcttgaccttggactccaggcgatacggctggatgatggggacgcccaggggggtgacccactccaccacagagcccgtgtgggagacgaggtgggcgctctcgatcagccagtgctggatggcccgggtccccgagaacatctcctgtagactcctgaagacctggcgtacgaggtagtgggaggcctcccacacgaactcctggggaaagtcgttcagctcccggaggcgcttctcaatctgcaggcgcccaccgtagcgggtgaccccgtacaccacggtcatcactgtctgcttcaccaccttgcgggtgatgaaggcttccagcacctgtgccacccgcatgccccgctgggcgtcctgcctacggaacacctccacctgcgcggccacgccgctgtacacgtcctgcggcacatccgagggctccaggttgactgaggcggcgcccacgctgtcgcggcccagggcagcataatgctgtaggccgttgcatctactaaacatttaaggaaggaattataccaattttcttccatgtcttttgaaagacagaagcagaggaaatattgcctaattcattttatgaggccagcattatacctaatggcaaatacagacaaagacatgacaagaaatgaaaagagaaagaagaaaagaagaaagaaacaaaaaaactatacagattaatattgctcacaaacctagatgcaaaatcctcaagaaaatatcaaatcaaatccaacaatgtataaaaataattacatatgttaacaggggtgagatgacatcttatcatggttttgacttgcatttcctagatgattagtgatgttgaccattttttaatgtatgtgtttgccatttgtatctcctcttttgagaaatgtctattcagatagtttgcctattttttaaaaggattattttgaggtggtttttttttttgctattcagttgtttaagttccttatgtattctaattactaatcccttgtcagatggatgatttgcaaatattttttctcattctgtaggttgtctcttcactttgttgatttgtttctttgctgtgcagaagctttttggtttcgtatgaccccgtttgtctatttgcttttgttgcctgtgcttttgaggtcttaccaaaaaaaaaatccttgcccagaccaatgtcctgaggtgtctcccagatgttttcttctactggttcaaagtgtcgtgtcttgcatttaagtctgtaatctattgtgattgttaatattgagtgtcaacttgattggattgaaggatgcaaagtatttttcctgggtgtgtctgtgagggtgttgtcaaaggagattaacatttgagtcagtggactgggaaaggcagacccaccctcaatctgggtgggcacaatctaatcagctgccagtgcagccagaaaaaaagcaggcagaaaaacgtgaagagactagactggcttatcgtcccagcctacatctttctccctcgctggttgctttctgcccttgaacatcaaactccaaattcctcatctttgagacttggactagtttccttgctcctcaccttgcagacagcctactgtgggacctcaccttgagattgtgtgagtcaatattccttaataaacccccctttatatgtacatctatcctactagtctgttgctctaaagaccactgactaatacagattttggcaccaggagtggggttcatacatctatcctattagttctgtccctctagagaaccctgactaatacagattttggtaccagaagtgggattcatacatctatcctactaattctgtccctctagagaaccctaactaatacatctatcttgatttgatttttgaataggatgaaagagaggggtctagtttcttcttctaaatatgaagatccagttttttcagcaccatttattgaagagactgtttttttctaactgaatggtctttgcacttttgtcaaaaattagttggctctaaattcatggatttatttctgggttctctgttctgttccattggtctatgcatctctttttataccagtactatatggttttggctatagcattgtagtataatttgaagttggcagtgtaatatctccatctaagttcttttttctcaggacagctttggctatttggggtcttctgtgataccacacgaattttagaatttttttgtatttttatgaagaatctcattggtattctcataggaattgcattctatctctatattgcttttagtagtagagtcatttttgcaatattatttcttccaatccatgaacatgggaagatgttccatttttgagggaccttttccatttctttcatcagtgttttatagcatttcttgcagagaactttcaactacttggttaaatttattcctaaatattatatatgcacctattgtaaatggcattgctttctttttctttttctgctagctcatcatttgtgtatgggaacactagtgatttttgtatgctgattttgaatcctgctgctttattgaatttgtttaccagttctaagacagttttggtggagcttttagggttttctatgcacatattatgtcatcttcaaacagggaaaatttgacatccttgccctttatttctttctcttgcctgatttctctggccaagacttccagcactatgctgaataaaagtggtgaaggtgggcatacttgttttgttccagttcttagaggaaaagctttcagtgtttccccattttgtatgatggtggctgtggatttttcatgcctatcctttattttgttaggtatacttgttctatatatttattttgttatgtatgcttgttctatacctactttgtttagtgttttttatcatgaagaaatgttgaattttatcaaatgcttttcctgcatttattgagatgattatatggtttttgctattcactctgttgctcttcaataaatatgatgtgatgtcattttttttatttgaatatgtcaaaacatccttgcatccctgggataaatctcaattgatcatagtaaattatctttgtagtgtgctggtggatttgatttcctagtatgtcattgagaattattgcacttctattcatcagcgatattggtctgctgttttcatttcttcttgtgtcccattctggttttggtataagggtaatgctgccttcatagaatgaattaagaagaactctcttttctttgattttttggaacagtttgaaaagaatgggtattaagtattttttttaatgtttggtagaattcagcattgaagccatcaggtcctgggcttttctttgatgagagagtttttattactggttatatttcattacttgtaattagtctgtttagactctctatttctttttggttcaatcttgataggttgtatgtgcctgagaaattatacatttttactaggctttccaatttgttgactcatggttgattgtaatagactccaatgattctttgtatttctgtggtatcaattgtcatgtctcctttttcatgtctgatttcatttatttgagtctttcttttttcttactttgtttagctaaacatttgttaattttgtttatttttttacaaacaaaactctttgttttattgatcttttgtattttatttttactttcaatttcatttatttttgctctgatcttcattagttcatttttcctactaattttgagtttggtttgcttttgtttttcttgttccttgaggtgcatcattagattgtttatttgaaatatttctacttttttcgatgtaggtgtttattgctataaaattccttcttaatactgcttttgctgtatcccatagcttttgatacattgtgtttatactttcatgtgattcaagaaattttaaatgtacttcctaattttttattaatccattggttgttcaagagcatgttgttaattttgatgtatttgtacagttttgaaagttatttctgttattgatttctagctttatttccttgccgtcagaaagtatacttgatgtgatttcagtacttttaaacttgttgagacttgctttgtagcccaatgtgtggtctctccaggagatttttccatgtgctaatgaaaaaaaatgtgtattctgcagctgttgcatgaactattctgtcaatgtctgttaagtctatttggtctaaagtgaaatttaaatacaatgtatctttgttgacttcctgtctagatgatctgtccagtattgagattgggttattgaagtctgcaactattattgtatgggagtctatctctccctttagatctaataataattgttttctgtagctaggtgctccagttttgggtgcatatatatttactattgttatatgctcttgctgaatttatcccttgtctgttttatttttatctgatataaacatagctactcctatttgattttggttcccacttgggtagaatgtctttttccatcccttcactttcagtctatatgttttttgataggtaaagtgagtttcttatgggaagcacatagttgggtcatttaaaaaatccattcagccagtctatatattttaagtgggggatttaatctgtttacattcaaagttattataggtaagaaccttcttctgtcattttattcattgtttgctagttgttttgtatatcttttattcctctcttcctctcttattgtttacgattgtggttttggtagttttctgtagtaataaggtttgattcttttctcttatgtgtatctgctttgccagtggattttatacttttgcatgttgtcatgatggtaatgatcctcttttcacttccagatgcaggactcccttgaacatttcttgtaagacaaaaagctcaatattgtcaggatgtcagttcttcccaactaaatctatagattcagtgaaatcacaatgaaaatatcagaaaggttttgggttttttttttacaatttaaatttttactagagaaagatattattcacatccacaatttcttaaagtcctttataaatgagtgtattccataagaaatacactaaaatcattacttatgtttcatagagggaaaaaactatgagaatactattaacccaaactatatccatattatacttatttcttaagcatttacatgttcaaatacgcttgttggatagtgatcattcatccccacagtggtaaatttcagcataatattaagtgactgagagagactaaagtagtcacatgtagattagataaacagatacttattctgttatacctaagcttacttataaagcaacataaaatgagcattggataacaatgaaaacaaatgtaaacaaacagaattaaatgttactcccttccctgaaaaacaacagataaaagggcttcttgctttattgaatacaaaacatgatctattgtaataaaaaggtaagacattgattttacaaaattatatttccaaatacagataaaaaaatcttgaacagttaattcagattttattgatctaaaatgtgcaaaatatctgataatacttaagtttattaaattcattgtacataggctgatatcatcccatacaaaaaaatgctcagtatcttgttaagattcaaaatagtgtttaattatctgagcttaagatttattgaactactatccaaataacaacaaaagtccatattgtaaaagaaaaaagtaaaactaaaaattttctgattattaattgacttgaaattcattcccattaaaacataaaactatagccaatatccatttgcaaagtgaagaaaaactggaagtccccatgataaatacaccaattccaaataaaaaattaaaatcaaattttgctattacaaaacacacatgatcttttaagttattcaggtttaatagatttactaaggatagagttcatagagcatgtatttggtacttctgtttagactcaggtatttgcaaagtaccccaagagaaggttgagaaggtaaaataaacataaaattgtgatacttctctccacaccacaacaaaggtgcttggatttaaaaattcaatttgtaactctagaagaaaaagagaaacaatttacaactccaaaatattttccagaaaaatgacaaaactggtaactacctagaaatgttattagtgaatcaaagtgcaagtaatgacagcattaacatcaaatgtatttgaagactcaaagttttaaatgttttcaatgacaactagttgatttttctaaggtggtaggtgtgaaataaagataatacaaatctaatttttccaggaactatagcactgcccgtccccatgaaattaaattataatttcactgttcaacataatataaaactgttttgagtaacagtgaaatagaagcatgaatttagatacacaccagccctatatgatggacttattcacacatagtatttttgataacaacctaattagatactgtctttcattgcttactataattctgagaaaccacttttaacagtatacatttacactaccacttaactaaatggggacatataaatatataaatttttaaagaaaaaaattccagttatttagaggagaaataaaacttcaattatttacttttttgaaactgcatttagataaaaaggtatatggtttatgatacttttcacaatgtaataaatttatattccaattttctcataaacgagaggttgtaaagcaaaatatttgttccttgaaaataacctctctcttctaaccctggtaagaacaatgagtgtgcccttaatttcaagactcttgttgtcatccatgtcaattgtctttttcatgaagtataatattttgagagagagagagagttgtaaaaattaaagagaaaacctgcttttggaatgcagcaattctaaatcatttcactaagaagcatcctttgatatgctggtctgaatttttaatataaaacctaagcagtacttatttctgaagtagaactttctccagttttaataacttcatacatagcaagactaaggacatcaacctgtgcttttgagattttggtaggtgttctaataatgtattattttagatatggctcattgtcaaattgggtggacagagatttcatgaattggttacagaaagctaactaaactcttaatgactgaataatggtttgcattttgcttgagccaaaaaagatgtttaagccatgtaccactacattccctgcttaacattcctaagtttctttattcttcatagttttctaatgaacatatattttcctgagtaagattataaaaaagttaacctttcttccaaaagtataaagacaaataaaatgtcgactcacaatacatattttttgcatagcattaaaggtgcggagatattgcctgctcctcttcattatgattggcccacctcttaaaaagactgcaacaggccgggcgcggtggctcacacctgtaatcccagcactttgggaggccgaggcgggcggatcacgaggtcaggagatcgagaccatcctgcgtaacacggtgaaaccccgtctctactgaaaaatacaaaaaattagccgggcgcggtggcaggcgcctgtagtcccagctactcgggaggctgaggcaggagaatggcctgaacccgggaggcagagcttgcagggagccgagatcgcgccactgcactccagcctgggcaacagagactccgtctcaaaaaaaaaaaaaaaatactgcaacagatgattcaattgtctaaaatacttcgaagtacagaaattaaatgctttagcccataaacatatcccttatctactgtgttgctaaggaacatatcagccatatctatcatgcacacttcagcagtctcttggcaaccagtgggaagatggtagacaactttttccagttgggaaagtacatttccatttaaatgttcctgtgacatgcttttccacccattgtcttgctctagattttcaactttcaatgaagtctgactgtgatacttttttgtatacattttcctgtgatgggcatacatcttggacaagcttttgcctactgaagcctctatttttccattcactgtggaagttaatacatgaaagttattattgcactctagtacttctgtgtctgacagttgtcctttggacaaaaacttttctgccaaatttctgtcattcagttttgtagtgattggctgagatgaaccttcctaaagaaacagtaatgaacttgcgtaaaagttaagctgcttctggttttcaaaccactgcagaattttctcagtcttctgaataatggcagcaacagcatcttttattaagcagtacccattatgaaaaaatccgaagactccatcctttatagcttcttttgttaagcttcttccataatgttggtttgtgtctcatagctatgggaatgaacaagataaaccctcatgccaagcaccaagaacccaatctcttccattaatgggtccttgctgacctattgctgaattttctcagatgaggcaaaaaggatcatagcttttttgccctgtctttacatccattatacagggcttattaaatttatgggtcacattttccagttttaggtataaatcgtttggggcagcgggaggtggccagatgccataatattttggcaaatattgtcgtagctctagaagaacaccatcggtacagtcagcagcataaaccatattatagaattccagctctcttgggccccttggaggtggttgtaactgtttcaaaactgtgccatctggatgttgcagtatacccattttgtccttcccatacctgtgcccggccacctgatgcaagatgggcacacagccactgaggaagcggagtctgccgcctgccggctgcagggtgcccttaggggtggcctcgatcgccggtggggtccgcatttctgggggacccggcgcctcgacccggagcggggatggtggctctcttgccataacggagaacagaagcggtagggtcagcaagagcaggaaaagaaaaatagggggagggagggggcgccggagaacccaggggtcgctcaggctcgggcgcgaggaggcccgggggttcccgcggctggtgcccgctgaggtgaggggagggggcccatgacgccgcggcggcgcgggcactccctctgcccaactctcggctgagcgcggctcccggctcaggcccctctgccgccgcagccgcgggcccagtagacacaacccagccgaggagcagcagcagcagcagcggcgccccgcgctccctggggccctccagaaagtttttttatggatatcagcaatctaattctacaatttatatggagagacaaaagactcagaataaccaacacaatattgaaggagtagaacatagttggaggactgacaatatccaagttttaagacttaccgtgaagctacagtaaccaagatgttgcggtattggtaaaagaaaagagaaataggtcaatggaacagaatattaaaagcccaaaaaatagatccaaataaatataggcaacttatatttgataaaggtgcaaaggcaatacgatggtcccaaataaaaaatataatgtatttggagatcagaatcaaggccagagtaaccgagtgtagcaagggaaggagatcagctacagaagagattagagaagtcaacagggtttagcgatgcaacatcccttaggctatgaaaagagatcaatgtttgtagcaggattttattttgagacactgactgaggtttctctcattctcctaccacctcacacagtcaggtaccttcaccatcctcaggaaaaaaaaaaaaatatatatatatatatatgtgtgtgtgtgtgtgtgtgtgtgtgtgtgtgtgtgtatatgtatatatgtgtgtgtgtgtgtgtgtgtgtgtgtatatatatatatatataatatatatatatatatacatatcttatatgcacagccctctaggagaagaggttgttcaaggagcacagatattagaatttttgcctttgagttccaaaacacagcctttaaagtcgtggtagaaataacgatcttgaaagacaacattctttaacagccagactttctgagacaggaaataataatggctccatatatttagcattcattgtgtgccaggcacagctctgagtcccttatattgagacctcaggaaaaccctgatataggtaatgctgttgtctccattatatggttgagggaaccgaggcacagagagaggaattaacttgctcaagtcacgcagcagagccaggacttgagcccaagcagtctggctccagatcctatgcctctgaaagtaagggaagagagtcacagagagaacgcactgggagggggagaaacaggggtgggaagttggtggaaaaaggaactaaaaatttctgagagcctgccagggtggaagctgcacccctttccctttgttctgagctgaggactccagtcttgggaggacattcccaggacagatgaagggatctgcccctatggttgtttctcgctgaatcagagtctcagtcttgctccttaaacccattcttaatcctgttccctctcctgctcaaacacctcccagggctccctactgcccacaggataaagtttttacttgggctctgggagaacccactaagggcctagatgccctgtgctcagccagagaggccgtcagggttttgggttcagagacgtcaccctgcctccacccactcacctccctttcttagatcccaccagtccccaggagccccatgctggctgtcaacgaggctcaagcagaggtgtcagcatagttttgtttctgggactctacagaggtgggtgggtgggtaggacagtcactgtgagttcgcacccaggggctccacccgcagccaaagtccaccctctgcgcgcaatatcagctcgggtttcctgcggggttcagtgtgggtcggcaggatgcggaagtgcagcagggtgagcgccaggaccaccttcatctcagccatggcgaacgcctgcccgatgcagtttctgggggcaaaagtgagggaatctgactgtgcccatgacccccatcccggccccatcatgcttagaacctggcctgggaccccaaacgcacccacataggcttgaggggcagaaagaggggataagtgtccacaggactcccatgtgtgcttgcatatcccccaaacctggcccaggctcctacccccagttcagataaacagatgaaggaggggactctgagcacaccgcagacccctctaggaccttcccaaacccattctgtgaacagttgcccatgaactcctgaggaagggagggaaggagagctggaactgggaccatctgtaacttccccctttttggacccctgcacccatcatgccatctctgcctcagacacaggccatccttacctgggccctgccgagaagggaataaaagccagaggtgacctctccttgatgttctcttggtcgaaacggaaggggtcgtagacctgcaggtgagaccaagaaggcttgctgggtggggtcacccagttgggtggggtctcccagttgtctccaagacccccggccttggagagacattttggcagatgtgtctccattgaggagaggtgatgttggattttcctggtcaaaaccctgtcacctcctctaggaaccttggaatggactccaaaaagggtggggtgagggaggcactacctcagggtctggccacacagttgggttgtaatggatcccgataatattgatgaggcagacaatgcctgtgggagagaagagggcagtcaggacaaggcccccctgcctgagggacccctcttgctacccaggaggctcctccccctgaggctgtgagcacctttggggatgacgcggccgtctgggagcacaaagtcctgcgtgcaacatcgggagatgaccgggactgggggatgcaaccgcaggctctccttaatgcacatggtcaggaagggcagctgggccaggtcgtccctaagaaaacaccccagccccaatcattatcaagggaacaaagacacaattctccagcttctctgtttccaagcgagactttttctccctatcacaaaataaattccacatggatgaaatactggagaatttaaaaagcagaaaaaaattagaaaagcagaaaattagaaaagtaccagaaaaaaatggtgccgattttttaaagattattctgaggaaaacacaacactctgaagccagctattaaaaaggttaacatattggcctaaaggtaaatatcctttatggtaagaaagcaaacacaaaatgcaagtgaataagaaacaaaatacccagatccactgttttgctcttattcatcattgtattagcgatagtagcaaatgcaattagacaagggaataaaaaagagaggaatgcaatttgaaatgtggtggtggcagacggtgattttatacttagaaaaacagaacacttcactggaaaacatttataaacatttaagacccagtaagggagctgaattgtttgcttaatctttcttctttttctgtggctgtttaaaattttaatacattgtacacttaagtggctctaaatttaaaaactataaaacatcctctacccctatggcccaaagtcacctgcttcttctcctcacaggttgcctaagttattattatttttatgtatctttctagagataatttttagtatcttaaaaatatgagtacatcatatactatacacatattccatatcttttctcatttaacagtatgtcagtcttttcttgtgtagctcctgggacttgtatcaaaatagggttatccctactctgaagctataaaataattttcccatggtttcttctagagcttttaacagcctttaaaaaaaactatatacttgagtaatctaaacattgtcctattataagacatggcaaccagattgagttgattttttttccaggaaaataagaagcatctggaaaaagataaaagataagatattaataataatgataataatataaaatatctgaattaaattttaacaagagacgtaaagtctctgtatttccaatgaatttatacatttccctctatctgaataaaagatacatttcaccatagcaacaaaatatctaaggattgatttaacaaaacatgcatatgatatctaggcaaatattttaagctctattaaaagcttaaatattatttgaatacattaataaccattttactatgacaaactatgtgtcaatattatgatgttacctgttttcacacatatcaatcacatattcaagtcaaacaagagaatatattcagtgcaaatgataatctatctaatttttaggaacttgatgaacttactctaaacttttttgggaagaaaaacatcataaagagctaggtcaatctgaaaataaaatattagagaaaagcaagtcggcttaggcaaagaatgcatgactaagacctcaaaagcaaatgcaacaaaaacaaaaataaagaaatcggtcctaattaaactaaaaagcttctgcacaaccaaagaaacaatcagcagagtaaacaggcaacccacatagtggaagaaaatatttgcaaattatgcatctgacaagggactagtatcaagaatctacaaggaactcaaacaaatcagcaagcaaaaaatcaaataaccccatcaaaaagtaggcaaagacatgaataggcatttctcaaaagaaaatgtacaaacggtgaacaaacatatttaaaaatgctcatcactaatcatcagggaaatacaaattaaaaccacagtgagataccccctacttctgcaagaataaccataactaaaaagtcaaaaaacaatagattttggtgtggatatggtgaaaagggaacacttttacattgctgctgcaaatgtaaattagtacaacctctgtggaaagcagtaaggagattccttagagaactaaacgtagatctactattccatccaacaatctcactactaggtatctacccaaaggaaaagaagtcgttatatgaaaaagacacatgcacacgcatgcttatagtagcacaattcacaattgcagggatatggaaccaatctaagtgcccactgacaaatgagtggataaagaaaatgtgacatatatacaccatagaatactactcagccattaaaaggaatgaaataatgtcttttgcaacaacttggatggagctgggaccattattctaagtgaagtaactcaagaataaaaaaccaaatatcatatagtctcacttataagtggaagctatgctatgaggatgcaaaaatatacagagtgatataatggactttggggactcagggagggacgttgggagggaggcaagggataaaaggttacatattgagtacagtgtacactgtttaggagacaggtgcactcatccatgtaaccaaaaaccacctgtaccccacccccaaattactgaaataaaaacagaagagaaagtcattctaccagacattaagacctattactgagttacagtaacaaatgtagcatggcaaagctgcaagaacagaaaaacagaccaaagaatggaatagggagctcagagacagatatgtgaataagtgaaaacccacatctggtaaaggaagccccacaaaaccctgggaaatggatggatagtacagctacaaaagaaaatgtggacaaaattggcttcatataaactaaccaaaagtgtccccaagaagtcaaaaggcaacaaaagacagaaaaaaagatttattttaacacatagtctcataagtaaatatgggaaaataacccaaaggaaaacagcaatgtaagatgatctcttccacaaaaagaaaaaaaatggcaagagatgttctatcccactcttatttaaggaaacgttcactaaaagaagaaatatgcagactgacaaaaatttagtgtggtgagtcctcaaagatctaggggcagaaataccatttgacccagaaatcccattactgggtatagatccaaatgaatataaatcattctgttataaagatatatgcatgcatatgttcattgcagcactattcagaatagtgaagacaaggaatcaacccaaatgcccatcagtgataatccagacaaagaaaatgtggttcatatacaccatggaatactatgcagccataaaaatgaacaagatcatgtcctttgcaggaacatggatggagctggaagccgttattctcagcaaactaatgcaggaacagaaaaccaaacaccacatgtcctcacttacaagtgggagccgaacaagggaaactcatggacacatggtggggaacaacacactctggggcctgtcacagggaggggttggggaggtgagagcatcgggaagaatagctaatggatgctgggcttaataccaaggcgatgggttgataggtgcagcaaaccactatggcacacgtttacctatgtaaccaacctgcatagcctgaaacttaaaataaaagttgaaaaaaataataataataatgtaatactcttggcgaagttatgggaaagctgttgccatcaaactcagctaataggaatagattttttattattattaaaattgtggagtaaaatggccttttattctgcaattgcacttttgggaatttgtcctgcagagatattcacacaaataagcaatggtcactgtacacacatgctgactgcaacaggtttaatttagcaaaagtctgaaacaagctaaatatacattgatggaaagaggtttagataaacatccacacaacagaatgctagtaccatagaatacaatgcaactacaaaaaaggaggaaacaggtcactagctgtgtcacacaatgcaggctggaaggtaaatcagtacagagattctggaaggcaaattggccatatctacaataactggaaagatacacaagtgctttcaacaaaggtgtgaaacaaataaaatatggaatgttatgccatgctaaaaaaaaaaaaaacagctgtaagacacactgtcgagtggcaaaaataagccacaaaatgcatacatgtaaatagcaaagggcaaaatacatagtatatatatatatgaaatacatatttctatgtatatggaaatatacacatttcattgactcctaattattaaattaaataaacatattaataacattataatttaataattaggaatatatatagtatatatggaaatatatatttctatgtatatgaaatatatacatttcattgactcctaattattaaattaaataaatatgttaataaatttaatatatattaaaatatataaatatgtatatatttcattgactcctatttatataaataaaatacatagtatatatatggaaatagatgatatagatagatcgatggatggatagatagatagatagatagacaagaaggatgaatagataggataaaggatggatggacggatggatggatggatggatggatggatggatggatggatgaacggatggacagatgtatagatagatagatagatagatagatagatagatagatagatagatagatagacagatagataagcagacagttagatgacaaattgatgtctcaagagacccctttagggaaagcgaggatattaggtggggtggtgggaatgtcaaggttaaaccctgtcttatctgtagtgtcgcattgagtccaagaagaatctgttctcatcattgcttttggaagtcaacactcattttccatgtataaatgcaaaatagaatggtactcagtctttaaaatgaaaagaatcctgtcgttggtgacaatatggatgattctggaggacattatgctaagtgaaataagccaggcacaagaagacaaatagcaaatgatctcaattacctgtgagagctaaaataggttacatagaaatcacagagacagaagaaaatggtggttgccagaggagggaggaagaaagaacaggaagatgttggtcaaagggtacaagtttccattagacgggaggaaaaagttttgagatctattatatgcatggtgactacagttaataataatagattatgttttccaaaacggctaaaagagaaaatttcaaatgttctcactgctaaaataataagtatatgaggtaatggatatgaccatcaggtggatttaatcattctgcattgtgtacatcataacatcacagtgtaccccataaatatatataatcaaaatttgtcaattaaaaataaagacaaattaaaaaacaaactcattttctaaaactcatattttgagaaaaacagaagatggtaaagatacattgttagtgggcagacctgtgtctattttatgtactcctactcacacagaaaaagagagcatgtgttcatatacagtgggcatcaggatagccattttctaggacacacagaaaaccattgatgatggaaactgccagagtgaggagtgtgaggcttaagaaggaagctcattttttatcaaaatttttggacacttttttaaacaatgtgtaattttgcttgaaatcttggttttaaaagcataaaaatgtttctccaccttacaggaccctgtgctgagcaaaggcttggatgtaagggcactaccttcaaaaggcctgtccagctcaatgtctcctctccatccccagctcctggcctggctcagacctcagaatgtccttccctgggacttccttctacaactggtcctctccagtatgccctctacactagccctaaaaagattctcctgctacctgtctcttcccattgcccttgagttaaaattgaagttcttgacttttttttccatgtattccacacccaggctctgctgccatctccaggttcatcatctcatcatgactcagtttctccctctctattcatctctctgtttctgtcttccctctctctttctttctctcttgctttccttctctctccattctctttttatgaccttctccctccccctgcacacaagccacttctctctttccctcttttctttctcttctctctctctgtttctctcactcttggtctctctctctctctctttctgtctctctctctctctctctctctctctctctctctctctctctctctctccctctctctctcactccctctctcctccctcgacctttgcctaggctctcttcttgacctagagccctactgcatccaaatatctactgatcattattaaggatctcaactgagacacctcacttttattttcatctattcatgtcttttagagaaaaattctcactatgttgtccaggctcatcttgaagtactggcctcaagtgatcctcccacctcagcctcctgagtggctgggattacaggtgccagccactgtggccgggtgagacactttctgtacctccagtcatgcttctcttgttctcagcctcatccctgcccatgtgggctgggagtttcctgtcctgggactgttcccccaccaggctgggagcacctggaaaacagatcgcagggctggattcttccaagctctccagagcaccgaaaggtgctagatacaaaactggggataggaatacagtgtaggagcatttgctgaatgaagactggatggatgaacaatgcaggtgttctggataggaatgaatgacttttaccctcaggtctctcttataaatccctggactgtacaacaggattgaaattagggtaaggaagagcaaacattcagaaagtgaagatgtttgaaaaaacatgataattcagtgaaaagaggaggtggaggagaaattcatttgctgaacacatgctaagtggcatcatctgccttcacatgctgtcacaaattctcccagcagcccaggtcccaaaagcctgcaaaccatcccctgctggcctggctgtgtattaagccctgcctctgagatttgcaccgattcccactaagcgataatggaagaattgaccaaaaaaactccctccctctgcccacctgaggagcagaaccaatgacaaaagatcaggaacaggccagcacctgcactcaccattcaatctctataggttcacggtccttcagaagctcttgcacttcttgccggcactgttcctggtattctgggtgctttgcaaggtggtataggacccaggagagaccactggctgtagtgtcatggcctgaggggcagccaagcaaaactgggtttctgggctgcttcagcaccagagggaggagagcacccaaactctgaggccctcaggagaatgtagggaggaggaggatgggcagaattaagtgatccagggtccacccactacgttcctgggatggagaggcccctgtccccaccgtagtcccacactgagaccctcaccctcaaacatgaaggtgtcagcttctgctcttatgtcctcatcagacaattccttcccatcttcatcctggagagaaggcaagacaatatccctgccccaaatcacaccagctctgaaggctcttgagtcaaacctaagataatttctgaagatccatcctccttccagaaacccaagcccatcatgcactcctagatgtctcttggtcaccaccatcagagcccaccacccacaggcttcccgctggcttcttcacctcctatttggccctgctgggaagagtcaatgacctatggatattttcttgtttcgaataatgaggacttttggagtaaagcattaactggcaacctgggttacagcatatttcaatggcaatttcacttggaggttagaaattaagtattggctgggcgtaatggctcacgcctataatcccaacactttggaaggccgaggcaggtgggtcacctgaggtcgggagttcgcaaccagcctgaccaacatggagaaaccccgtccctactaaaaaaaaaattagcctggcatggtgttgcatgcctgtaatcccagctcttcaggaggctgaggcaggagaatcacttgaacccgggaggcagaggttgcagtgagccaagatcacaccattgcactccagcctaggcaacaagagtgaaactctgtctcaaaaaaaatgaaagaaagaaagaactgaagtattactctgaatgtatttgctcacattctagagtggtaaactcagagaatacttcttatctttccagaaggcatctgggttataaacctataaacctacaggcatgtcgatctcactggaaaggagtagtttttattccagaacaaagcaaacatcctctctctctctctctctctctctctctctctctctctctctttctcattcccactctcgccctggaaggaagaaggggcagatgtgctagctagctatcctatataagccccaagatgtatactgtggggcccctctctgcagtgcattctggtgtatttacaggtaaaaacattgcattaccctagaaggaatatgggaatagagagccagctctacaatcctactctggttgctgctattgctgtgaatgatgaataggctgctgtgatccagggatttggtgcatctgtcatcatagatatagacatagatagatatgcataaaaatatgtcagcctaacttgctaacatgtaagtagagtaaaatctcaggctcctcactatttcaaacttagcagtcccctgccagctgaattccacagagtcatctctcaaacctatctctgacctgtctttttcaagcatgttccatggctcccagtgccctttggatcaagtccaagttctttcatttgacagaggcataaatctccactctattacttgaattcacatcccagagaagcctaccttgctcagcagaagcacatcaatgaagtctaaagtcttggactttgccttgttcttgaggaaatcatcaataccctgagtggggagggtgcagcgccgctcctggatgacggcatctgtgaagtcgtgcaccaggtggcaggccctgcggaagcgctgcccatcaggagtgagataatacaggaagtccgtgtgcaagagaatctgctggtttctcttttctacaaaggcactgagctccaagatggcggcaatatattcactgggcttcctgcatgaaggaggtaacaacttaacatatgcaaagtcccaggagcacctctcaccagcagctagaagctactgcccatcaggaaattgagtatccagaaacagccaggagacttgactctccaaactctcttctctgaggcattccatctctgagagctgcctccatgcaccaaggtacccagagcatagcttggacaccatgcttctctcccgtctctcccacccagtatccagcctgcactcttttccttccaaaaactgttcacaaaactcagacctcactgtcttccagctctttctgacccagcccccaccataacagacttgcattcaatgtctgctccatgtagcgtctacatgacaggcagacctccacagagctcagctgtgaccacatctgtcatcggcccaaccctcttcaaaagattcctgggaacctcctgataaagttcatgccacttttcctgattttcaatgtcctgaaatctatcccctgtctacttccacaacctcatgtctactgtctctttccccctccccatccttcaaagcccagctatgacacacagaaagtgccttcagaaaggcacttctggttaccccggtcagccatccttttccagcctactcccttgggttccaggcccaagttctcaggtcctaggaaaggactcactcctgacaattgctttcaaagctgaagacacatttctgcagactgtccaaggtcatgaggctgatgtgttcaaacatgtccagtctggcgctgccctctgaggccaggcgctgccacttgtcctggccagagaaaaaacagagccaaagctgggaactgcctcctgggagcaccttcccagacccaaacatcaagatggactccctgcaatcatcctcctggtcctctgccccaggtacccatccccaggaaggaccagccttggataggagcagaaactgttactattaggagataaagactcatggctgggagtcgagagatctgggttcaagtcccagttcagcctcctatggtctgtgtgctcttggtcaacctcctgcactcccataggtcccatctatcaaatcttcagtaacagttaggacaacatgctttggggccagataaaccaggacagaatcactgctccaccactcgtagctcacttactatctggttgaactttggcaaactccctaatctctctggacctcagtttcatagtctgcaacagggcaaaaccaaccaaagcctcatggggttattaaaattaaattcctaaatatgtatcatggagttggcaaatggtactgtttctgggatatggtgagtgctcagtaaatgttggttttactcatctccattgctataaattcatttcaaaaatatccctattacttgggaggggaacattacacactgggtcctgtcaggggtttggggacaaggggaaggaaagcataaggacaaatacctagtgcatgtggggcttaaaacctggatgacgggttggtgggtgcagcaaaccaccatggcacatttatacctacgtaacaaacctgcacgttctgcacatgtatcccagaacttaaagcaaatgtgtgtgtgtatatatatatacacacacatatatatatacatatatgtacacacacacacacacacacacacacacaccctgtagttgtttgggccgtttctcagaattgtgtttgcagagaacaacattgagagataaggcaatgactgctcctggacacatatcaggcttgcttctgcttgctaaaaaagcacattcccggccgggtgcagtggctcatgcctgtaattccaacactttgggaggccaaggcaggtggatcgtgaggtcaggagatcgagacaatcctggctaacatggtgaaaccccgtctctactaaaaatacaaaaaattagacgggcatggtgatgggcgcctatagtcccagctactcaggaggctgatgcaggacaatggcgtgaacccgggaggtggagcttgcagtgagcagagatcatgccactgcactccagcctgagtgacagagtgagactccagaaaaaaaaaaaaaagaaagcagattccctaagcctagtgctcctttccttccatgcaccgtactgcataagcaggcaactattcaaacctctctatggcaccccgtgggatttaagtggtttggagaaattatgcaaaccaagaacatgctgcttgctatgccgtgagtaataaattgctgtttgtctctgacccaggactctcgtatctccttgcagaatccatgaagtattaacaaaactagcttatcagcttgcaattaagaaaaacatcctaagcacttcacaaaatcccaactcccaattcttcacttctccctttgcactgtgatttccagcaacttctattaagagatggagactgttttatgaccctttgagtctgtgctaacctaagcctggttgaactttgaaacattgcagagaaaatgtccagagacattgcagtctcctggcagtctctcagaacccagtctgtgccatgtgaacagcagggtgcctccgggaggcagagaaacacatggagaaaagtccaggtgtcacagctgaggccatcccaggtcagcctaaagctagcaaagccccaaacaaacatgtgaataaactgagccaggatcagcaaagctgcccacatgacccacagctgttcatgtaccaagagtgatcccatccacatgcagaagaaccagccaactgtctcacacacttgttaagtataataaacccttattgctctaaaccaatgagttttcaggcggtttgtactcagcaattgctactatgcaatcttgatctttactctcttgagtttgaaggatttctgtgagagaagcatggaaactcacaccttttgagacatactatgtgctggggacatgaatccattaccaccttttaagtagagattgttattcccattttacagatagggaaaccaaggctcagagaggaagagcattgtccccaaagcacaaccaaaattccagagcagatatgcctgtggtccctctaccccaaggctccagctgggacccagagttcaagggactcacgtgcatgatgttcacactcttgttgaaaatcttcatataaggcttcaagatgttgaaatggaaggcaggcgtcaacatccgacggtggcggctccacttgtcaccaccactcagcaggagcccatcccctggcagggcaaccaaggacagtggtcaagggcagcaccctcccttatccctaaaggatatccccaaccccattcacctcaattactcacccagccagggcttcaggaagccatagaaaatcatatccttgggtgcgacagcagctgacatgattgaggaccatcagtggccatggagaggggtgagagaaggactttgggtatggaggaatgctcccagccaggggtgtgcacttccacgcatcccacccagcatagcaggaagaaggccaagggtagaggaagaagggaggatggtggaggaaggagagaccagaccaggctgcagcgacagagtagagcaataacacagcatgccccagcacacagtgacatatctcctacaaggtccaacatgttctgcaacacctgagcatagctcaacactctacagaatgcctttacagggacctaggacactctgtctactcccagcactctctgctatcttctgacatggatctgggacctggaatattgccccgacagttgttaacattccctgacatggccaaaacacatatgacaaaccctaaatgacacaacatgctctgccatggacctgagatggtctgatatgacttctgtgtatcccagtgaagggtcctagataacatttaaatatgatgtcactaatgtcctaaacatggcccgggtataaccaagcctattcttcggcataattcaaatctaccctaagacctaactatactaagactcaaataatatctcagacagttctcaaagattccctgggtcctacaccttggacaagcaccaaacatggccaagacatttgaagtagaataaaaagacaatctcacactacatctcagacaagaaccaaaaagactctgacatgccccaaatgtcctcagccacaactgagccccacacatgatgacttctgtatatgatcccaggtggaagcatataccagatacaatcaaatataatgtagaaaacataggctatatatgggacccttggaagaaaggtgggctttctgattggaactgggcttctgagactcatcgttgacaccatatgaaaaggcaaagtgacacagagaatggtaaaatcgagagaaggagacagattcccagtgatgtggattaattgacacctggatccaaccatgcctgaagaccactctccccagacttacagcacattgattctctttatttgcttagaccacatgagtctgagtttccatcactcgcaactgaaagagacttcagcagccagagagagctgaggacctgcccagagtcactcagcatcctgaggttatagccatagtttctgtgggatgcttcccctgcccctgcttagtctggcctgttcaagcacaggatgagcagaggtaaagaaagggccccagactggggtgggatctcctactggagattgctggggcctggagcaggagagccatgaatagggtggatgagtgacaggatgaggtaaaaggaataaactcaccagacttgaacatcacataaatagcagcccagattctccaccagcctcaaatccccctagtaccataggcttagggacagacaaggctgatgccaggcctggcagcggtacctgtatactaatgatgtccactgcatcacccttccccttgctttaaaatctttttactcatttttccagcaactcctcctccaggaagccttccaatctgcccccaggaaagaccttgttctcccagttgtcacacccatctccttcttgccaattcctgactccacgaagtttgagatgtctctgtccagatccatttcctcaagcacggggctttctcgaggacagggccctaaattgaggctttttggagccccagtggtgcccagaacacaaaggcagagagagatggcagtggagggaggagacgctgacatggggggttcgtgaatacatgaaggaaagaggaacatggctgagagagaagcaggaagaggggcctgggccctgcaggggccacacagaagcttggggaggggagaggctagaaggcctttgatgtttcccagcccccactaccacaagctctgcacgggtacctgaggcactggtgataggccggataatgtcagggtggcataaaatgaggagggggaaggtaggacccagccacaacttaaagccctggggatatgtggtcaccagctgggtcaatgtcttcatgccctcttccgtgggagtgacctgaaaacaaggcagaggccgtcagcccttgtgatggttaattctaggcatcctgaattaatcatgaattccacgtgaccgagccaagagatgcccagataaaacatgctggtaaaacattatttctggatgtgtccatcggtgtatttccagaagagattcacatttgaataggtaaactgaggaaggatgatccacctccccagtgggggtgggtgtcatccaatcctttgatggtgcagatacaacaaagaggcagaggaaagggtggatgtgctcatccatctgctcctgtccttggacatgagaactccaggttctcaggccttttgggactcagactgaatttacaactccagtgtccctggtttctggcttgcagatgctatatcatgggacttcttgtcctccatcatcacattttccaatttccgtaataaactctctctctcacgctctctctctctctctctgtctcatacatgcatgagatataagcgggaagatatcctgtcaattcagtttctaaagagaaccctgagtaatgcacctccccaccaggagccacatcaagttccccctgcagcctccagatgtggtgcagcctctgccctgagcatcgtgtctggattctgaacagctgcagagaatctcagctgacccctgctccttctctcttggggctgtctccaagatccaaagataatggccgggcgtggtggctcatgcctgtaatcccagcactttgggaggccatggtgggtggatcacctgaggtcaggtgttcgggaccagcctgaccaacacagcgaaatccccgtgtctactaaaaatacaaaaattagccaggcatggtggctcacacctgtagtcccaggtactcaggaggctgaggcaggagaatcacttgaacctgggaggcggaggttgcagtgagctgagatcgcaccactgcactctagcctgggcaacagagtgagactctgtctcaaaaataaataaataaataaaagatccaagagtaaataccaaagcagagggagaaggcaagctgtctgctcaagaggatgtgttttctcgtcttggaaatggtttcaacctggggatggccacatggaaaagtccgcatggaaggaggtctgtggacagcagtgtggcctcaggacatgtccctgaggctggttcctacatccctttcacgtcctggctggtccccaccagcggctgttcctcccacactggggacattccattctcagcagcccccaggcgtagaggagtgactcttaactgtctacagtaagcacctcctgcaggccaggctctgtgctagtgtgtcctattcaccctccactgcaccgatggacacgcccatcaattttgccatttacaagtgagcagaccaaggccatgtcccccaaatgggagagcaggtctaagtcggaggccaaggtctgcggagtcaaggacagcttctgaaaagagaagggagtggccaacttttattcaggcaggtaacaaggccgactgggacatgttagtgaggaagagcaagataggaggaaggtgcctccagaaaaggaggcagcgggagactgcccacacttctcttctggaccctctgtgtccctgcgtatggaaaggggctcagagctaattcctgtgagaaagcagcagcacagagatgggcagacacaagcaaatgggccaggcagggagtagtccctggacagtagactcaggaggcctcaagtccagcagtggagaaggtgcaaatgccaggagatctttgctctgtgcacccataccactcccacaggagaccctcagaggtgcagtaacacagggaagacaggcaggaaaaagatccaagcaggctggagtgggaggacagggaggtgagaaagacttgggatggcacatcagaggaatgagtgagcggggagaggaatgagtgagcgaggagaggaatgagtgagcgaggagaggaatgagtgagtgaggagaggaatgagtgagcgaggagaggaatgagtgagcgaggagaggaatgagtgagcgaggagaggaatgagtgagcgaggagaggaatgagtgagcgaggagaggaatgagtgagcgaggagaggaatgagtgagtgaggagaggaatgagtgagtgaggagaggaatgagtgagtgaggagaggaatgagtgagtgaggagaggaatgagtgagtgaggagaggaatgagtgagtgaggagaggaatgagtgagtgaggagaggaatgagtgagtgaggagaggaatgagtgagtgaggagaggaatgagtgagtgaggagaggaatgagtgagtgaggagaggaatgagtgagtgaggagaggaatgagtgagtgaggagaggaatgagtgagtgaggagaggaatgagtgagtgaggagaagaatgagtgagtgaggagaggaatgagtgagtgaggagaagaatgagtgagtgaggagaggaatgagtgagtgaggagaagaatgagtgagtgaggagaggaatgagtgagtgaggagaagaatgagtgagtgaggagaggaatgagtgagtgaggagaggaatgagtgagcgaggagaggaatgagtgagcgaggagaggaatgagtgagcggggagaggaatgagtgagtggggagaggaatgagtgagtgaggagaggaatgagtgagcgaggagaggaatgagtgagcgaggagaggaatgagtgagcgaggagaggaatgagtgagcggggagaggaatgagtgagcggggagaggaatgagtgagtgaggagaggaatgagtgagcgaggagaggaatgagtgagcggggagaggaatgagtgagcggggagaggaatgagtgagtgaggagaggaatgagtgagtgaggagaggaatgagtgagtgaggagaagaatgagtgagtgaggagaagaatgagtgagtgaggagaggaatgagtgagtgaggagaggaatgagtgagtgaggagaggaatgagtgagtgaggagaggaatgagtgagtgaggagaggaatgagtgagtgaggagaggaatgagtgagtgaggagaggaatgagtgagtgaggagaggaatgagtgagtgaggagaggaatgagtgagtgaggagaggaatgagtgagtgaggagaggaatgagtgagtgaggagaggaatgagtgagtgaggagaggaatgagtgagtgaggagaggaatgagtgagtgaggagaggaatgagtgagtgaggagaggaatgagtgagtgaggagaggaatgagtgagtgaggagaggaatgagtgagtgaggagaggaatgagtgagtgaggagaagaatgagtgagtgaggagaggaatgagtgagtgaggagaggaatgagtgagtgaggagaggaatgagtgagtgaggagaggaatgagtgagtgaggagaggaatgagtgagtgaggagaggaatgagtgagtgaggagaagaatgagtgagtgaggagaggaatgagtgagcgaggagaggaatgagtgagcggggagaggaatgagtgagtggggagaggaatgagtgagtgaggagaggaatgagtgagtgaggagaggaatgagtgagtgaggagaggaatgagtgagcggggagaggaatgagtgagcgaggagaggaatgagtgagtgaggagaggaatgagtgagtgaggagaggaatgagtgagtgaggagaagaatgagtgagtgaggagaagaatgagtgagtgaggagaggaatgagtgagtgaggagaggaatgagtgagtgaggagaggaatgagtgagtgaggagaagaatgagtgagtgaggagaggaatgagtgagtgaggagaagaatgagtgagtgaggagaggaatgagtgagtgaggagaagaatgagtgagtgaggagaggaatgagtgagtgaggagaagaatgagtgagtgaggagaggaatgagtgagtgaggagaagaatgagtgagtgaggagaagaatgagtgagtgaggagaggaatgagtgagtgaggagaagaatgagtgagtgaggagaggaatgagtgagtgaggagaagaatgagtgagtgaggagaagaatgagtgagtgaggagaggaatgagtgagtgaggagaagaatgagtgagtgaggagaggaatgagtgagtgagcagaggaatgagtgagtgaggagaagaatgagtgagtgaggagaagaatgagtgagtgaggagaggaatgagtgagtgagcagaggaatgagtgagcgagaagaggaatgagtgagtgggcagaggaatgagtgagcggggagaggaatgagtgagcggggagaggaatgagtgagcggggagaggaatgagtgagcggggagaggaatgagtgagtgggcagaggaatgagtgagtgggcagaggaatgagtgagcggggagaggaatgagtgagtgggcagaggaatgagtgagctgcctccctctcttctctgtgttcccacaccccagccaccctcaaaacccagctccctgagccccattcctgcccctcaggaactccatgcatcctgagaccccagacccgtcctgctgacaaactcaccaggccctggtgtccccaaaaccagttctgtttcgggggttgaggaaaacactggaggcggcggcagttgtcatagaaggtgtaggtccaggccaggacgcgggccaggagccaggagcctccaaccagcagcagaagcagccacggggatgctgccacgggcccgaggcccagccaggacaggctcagctgcggcatcctgcagggcagacgggatggagggtgggatcctgaggcccagggaagggcccaggaagctccaaggacagtggaaaggggcaaggatgggcagtgctggaggcagatcagggaaggctctgagatgggtaaacaagagctgagatctaaagtccagaaatgcccaatgaaaaccagcagccaagtggcctccagttacacagaaagggaaagagagagagaggctgattagaatccaaaaaggcccagcctgaatcactgggaggttgccaggggtccagttaccaggaaatcaccagtctcccaggccagcagccttgacccaccccaaccttgggcagtcccctccccatcccaggccaggaccctccagccctgccactgccagcctggctcctatcagaagcagcttgtcccacataccctcctctccccctctgctaggaggtctttgcctctggcccctgatttccggaaggctgtgggaggcgaggctgggctgggctggtcgagccaatccccatggactgggtgtgtcttccaagcctgggcaaccaaccaaaacctggcgtagggccagctgggtgcagaggagccagctcagggtgacacagcatgggcacaggatccgcaggtctcaacatctcacacctgagtgggaggggatcttgaggaagagtcaaaggtgactctgagccccaaagtttacagccaccttgcccttccaaggcaagagtgtggcagataaagtcatgaacttgagagttcaggtggcaagagagtggggccaggccaaccattgtgccagatcatgttctgagctcctctccacatgtggtccaggagttcatcatgcaccatttctcagtgcagacttaggagattcagagacagaagctcctggcctctggcttcacagtctggcaggagttcaagtcctgcctccaggcaacccagggcctgggtcgagacatgactgacaggagtaggaacaaactatctaactgtgctggggattacccggtcagattttagagataaagagccccgctggaggagaatacctggaggctaggttcagcataggaggacagagaggggagatgggaggtaaggctgagaggggccatgagtggatggggccagggacaggagggcagagatgggggaccctgagtggagtccttattctgccctccccttgccctaactgtgggtagtgagcccctcctggactcaggcttcccatctgggaaatgggatgtcagataaggccttagagggggacagaggagggatcacaggaaaatgggccttagatggggacagatgaaagattctgaggagggagtgaagggaaggggctggcagctagcactttagctgctgtgtgtcagtctctgctctttgcaaaagacaatatgcaaagttcttttactgtgtactggactctaaataaagcacacctaccatgtgccaggtactctgtatacatgttgtgtactgtgtgccaagtgctctatgaaaagtgtgtccactgtgtgctgggcgctctacagaaaatcttgcttctttgttctcggtcctctatataaagtgaaatttgtgcggagtaacttatgtaaagtgtacctactctgcacctgctgctctatataaaacacacctactgtgtgtcagatgttctatgtagagcatgtttactacgtgcctggtgatctatgtcaagtgcacctactgtgtgtcaagtgctctacataaagcgtgcctactctgggtgctgggtactcttcataaactgtgactccatgtgtccggtactctacataaagcacacctactgtatgccagatgctctacataaagtgttctttctgtgtgtcaagtgctctacataaagcgtgcctactctggatgctgggtactcttcataaactctgactctgtgtggccggtactctacataatgcacacctactgtgtgccagatgctctatataaagtgttttttctgtgtgtcaagtgctccacataaagtaaaactactctatgtaaagttcttgacataaagaatgcctactgtgtgcaaggcactctccacaaagcactcctactatgtggcaggggctctaggtaaagcatgcctactgtgttccacctactctaggtcaagtgcacctgctcatgtcagatgctcacccgcgtcaccatgcccaaagccttcacaccaacctcccctcggttctctgagccagagccctgggattgttggagagacctgagtgatggcatccagagaagggaatgcatccatttaacaaaagagcaaactgagtctcagagagggcaggcctctagcccaagttacagagctcacaggaagccaggtttgtgagatcctcaagcccaaacctttttcctctgccatgctgttctgcacccattcattagggtcaatgccatattaatacagggacatgtataaatggaggaatctcaggcaatgtcatggtcccagaggggaaatatcttgaggtctttgaatcagcacctggctcctcctcccacaccccggatgctccacccagcagacccagggctcccctcctggccctccttgtatcctgtccagaattgccctgccgggtggacttgggtgagggggtgcttgaaggatggggctcctagcacagctgctaagcaggagggcagggaagacagtgctcctgacactggctgggtgttggggagccccaaagcctcccccaccccaccaccactgccagctcaatcaaccaggggattcaggctcctggccctacagcctcagtggggtagggtgcatcccccaaaatccctactccctctgcaaggacagacctcacctactggcagttccatccctgttaggctcagggagcaaagccagagtttgatgaacaggcggggttatagggacacagaagaaagcgctcccagtggctagaggggtttggcacactgtagaccacctgtgtgcctgggatgagcaggcagcctagagcaggaatggtggccaccaccatttgccgacataacctacacagcctgttttaagtcctttaagtatattagtcaccttgtttttcattttacaaatgaaacattaagcctggaagatacttaagtgaccacccacagttgcacagctggtggagccgggctatacacccagacctcccacccagcctcacattgtgctaccctcaccaccgggccgtgctccttcacgtctgtaaatgggcgtttcagcagcacccacctcacatggttgtcataatacttaaaaagacaatgcatgcaaaatgcacaaggcagactaaaggttcagcaagtgcaactcactgttcctgctgttgttgcagttgctgtgtaagctgcatatggggtttgacctggatcccacagggggcagagacatggccttgcactgtattagagaagggacctaaaggtccagcctgtcctcaccacgtgttctctttggctgtagattatggctaggggagcaacctcctagacacaggaggcttggcctgaatccagaagagttatctgtggtgaagtagtaacagaaaatttgaacacctgttaggtgttaaggcagactcacaggtggattcttgcaggggagatgccagctgttctggttctgggaactgaacaatccgtggagcccagcctcccatctagtgaagaagtgagctctacacagcccagctactgcatccatgagagtctctgcttgaatgtcccccaacatggagacctcagcacacacacacacacacacacacacacacacacacactctgcctttacagcagtggtccccaacccttttggcaccagggaccagtttcgtggaagacaatttttccacaagttgcagcagggggaggagaggcaaagatggtttcaggatgattcaggtgcatcacatttattgtgcactttatttctattattattacattgtaatatattatgaggtaattatacaactcaccgtcatgtagaatcagggagccctgtgcttgttttcctgcaactagatgatcccatgtggcggtgatgggagacagtgacagatcatcaggcattagattttcataaggtgcacacaatctagattccctgcatgtgcatttcacagtagggtttgcactcctttgagaatctaatgctgctactgatctgactgagcattactgagctcaggcagtaatgcgagtgatgtagagcgactctaaataccgaagaagttttgctcatttgcccaccgctcaccttctgctgtgtggtacagtccctaacaggccacagaccagtaccagtctgctgcctggaggttgggggtccctgctttacagaatattagagggtagatactctacggaaatgagcctcaaactcaaccagttctaaatcaatgagaaaggggatcatttaaaatgcatcttcctctatgtacacacatgtcaagggaggcaagatatgaggctaagggattgaggtacagaacagcaggtatgtctgcaagattttcacagaaattaggtgaacagtgcacacatgcatacacttctatctgtcatatttgtataaataaactctagcatgaataatttttaagcttagagtatagaagtttatgggccgagcacggtggctcatgcctgtaatcccagcactgtgagaggccgaggtgggtggatcacctgaggtcaggagtttgagaacagcctggccaacgtgatgaaaccctgtctctactaaaaatacaaaaattactaaaaatacaaaaagtatctaggcatggtggtgggcatctgcaatcccagctactcaggaggctgaggcaggagtaccacttgaaccctcttgaacatggaaacccaaaagaaatcttaaaaactgagttcccagctatgatgggaggggatgtcggctatgcctcagtatgtcccttccttattaatctttaaccagaattatctccagtcctatctcctttgagactggaatcttcccatcctttgcaggagctaaagcctccctgggcagagagcccttgtgtgctggaggaagaggtggaggctgcaggttcctgaacgccccctgaggctcctcctggcccctccagacccagaggacagcccttccagggtggtttcctggggaggcccatgggaatgacctgctgggaaggccactgcaggaataaagctcacagcaccagtttaaggaggcctttgtctggctcctacacttgcctacaggtaccccctgaaaacaccttaaaaggctgctttttctgcatttgccttatggccacttgattgaaggcagccccaggtggaggggaaccaagaggatatgggtacaagggcagagtcagagagttgtggatggagctgcccagccggcggttggggtgcagaactgaggagacagggaagagagagatctcaggcttaggtggctgcctggggtctgtttttcccacacagagcacctggctgttcagccagcccaggtacccattgcagcttataggtcaacggtcctcaagtgaatgtgattgtggcccccaggagacatgtggtcatgtccagagatactctggttgtcaggacttgtggggagggggtgattttcctactagcatttgagggattgaggtaaaggatgccgctaaatgtcagacaattcacaggacagctcccactatgaagaatgatccggtcccaaatgtcacgagtgctgagattgagaaaccctgttctaggtatattttgtctccactgttgtgtccttgctaacctggttgcaagaggtaggatggagctggatgcattccagtgctgtgagatgtttgctctgcacctgtgtgtgagccatccgcagtgataccagagtaggcagaattctgtccacctgtcagaggagatgggggactgcagcctcgagagctgtggctgctccagcaagcaggaggcaggatggtggaatgtaggggtgaagcaggagcttgaggagagggggaaggttggatcagactcttggttggatcagacactgtgttgtgtcattgccaggaatactaaggtccctgctagggttggagaccatgcatctagaatggggtcagtgagtgacatctggtacagaatgatacaaacaaaccagctcagaagaccaaaatcatcatcagtcaatgacaatgacttttacgaggtggactctcacagtgctctggttactcctgtttttcacttggggagaggagcctcagagctgcaaagtcctttctccaaagacacacagtgagagctggggtttccaccctgggtctgatgcctccacaacttgtaaacatttcagaaaattctctctggaagccagagtggagtgtgtgcagaggagaggagataaggaggaggatggggcagcagtccaggagagaggatggagaggagtggagcagatgaagtgcttaatagaagagaggttgcccagcaatgggagggatgggggaggaaggtggctgacgctggagtatggtttctgggtagggaggctgcatggtctgaagactttccttccatgtcataagcgtggtcttttcatgtgggatacgttgtccagtaaagttcctcattgtccaggtgattctgtgttctccaagcgccgggctgactcctcctgcatggtgggggttgggagggcagatacttgaggacaatgtcctattgagactactatggggtgtaataatggatgggtccatcgagaaccaaggatttcagaaactcttgtagcaatatggctcacattattcataaaaatatttttgttttcttttatggtagaattcaggtgcagaggattcagactgtgatatttcctgtttgaggcttttgattgacattggtttgtgcaagatccttttcttatttcatttgtttatcccctttctttcactgtttccattcttttctgacaggagttttcacatacttaatatgcactttttgatttgtatatgcttttgtaagatacacattgcattctatctgcacatattttttatgtgactattttaaaatggtaaattaatgggcttaattttattagagaagttttaagtttatagaaatattgatcagaaagtatagagagttctcacatacgcctcacccctgcatgtggggcctcacccctgcatgtggggtcatctctcctattcctgacatcttgcatttctgtagcacctgtgctacaatcgatgaaccaatatggacacattattaaccaagttctagagtcgtctttccttttgttgacatcttgcattcctgtggtatgcatgttccaactgatgaaccaatattgatgaattattgttaattaaattccatagtttatattaggttatactcttcgcattgtgtatatggattttgacaaatgacatggattcattattactgtatcattcagagtagtttcatgtacatatattttaatgtgaccacatggaattatgctagagagttcatcctgttttttgtttttttcactcaatattattttaaaggttgacttatattactatgtgtgcatctaactcctgccaaaagctctatatcctttttcctctatatccgttgtttgcctctatataattttacctgccttctctccaattaggaacaagcaggcttatccaacacctccactaaaataactgctgcagggaacattctcttacatgaccccctataaacaggtttcagaagtcaagatagatacacagtagcaaggttgctggtacacagagcatgaatcccattaaaaattttaatttctaccattctacctgcccactaatagtgcaaaagtatttcttttattattattatttgagacagagtctccctctgtcaccagcgggctggagtgctgtggtgtgacctctacttactgcagcctccacctcctgggttcaagaatttctcgtgcctcagcctcggagtagctgggattactggcacgcaccaccacacctggctaatttttgtatttttagtagaaacacggttttgccatgttggcgaggctggtctcaaactcctggcctcaagtgatccttctgcctcggcctcccaaagtgctgggattataggcgtgagccaccatgcccagcctagagtgtgtaagtatttctttctcctcatagaccaatcaaccctggacattttataattttgggaattgcaggggtatacagtgaaattccactactgttttttattttccccttccctccattctttccttcctttcttcttttcttcctttttgtttttctttttctttctttttttttagcattctttcatttgcctgagtaactcctatgcatcatcttctcacatcttttgctcatttttgcgttaaggtacctccttcttcttgatataaccggtttcttgtttgttctatgttattcccttgtcagtttttaagaaattccccacactacttggatgtgttcctgtcggttttagacaatgcaaatatcttttccccatttcccatctgcctgttaacttcatcctggaaaccctttgttgaatggaaatccttaatgctgatttttttcatgttttaaaaatcatcttaatgtttgtgcttttgaaattttgtttaggaagtctttcctcaagcctagctcacaaagttattctcctatactttcttctactaaatttatactttgacatttggtatttattttttgaatccagctggattcctcctttgtatgtgctgttaggcagaaaatcagatttactttgcttcataaaatgagcagttttttcactacaatgagtaaacaatctaccttttcctcttgacttgtgccagtacatttatcatgtactatattaggttttgaataatgcagggatattttttgagatttccaatcaacttattcagatctatgtctgttccatctttcataattttaaaaatgactatgacgctattgtgtgtctcagcatgtgggagagaacagctcttctcttgtttccatttttataatattagtatggttcgtgctaacatttatgtatgtatgtatttgagacagagtcttagtctgtcacccaggctggagtgcagtggtgccgtctccactgattgcaacctccacctcttggtttcaagtgattctcctgccttagcctcctgagtagctgggattacaggtgcccaacaccacgcctggctaatttttgtattttcggtagagacagggttttgtcttgttggccaggctggtctcaaactcttggcctcctcaacctcccaaagtgctggaattacaggtgtaagccaccacactggcctgacatttatttttctgaaggaattttcaaatagtttcattaaatgtatggttgattcactggaactgtaaacacaattgtattgaggttataatttgagtatgaattgacatcattcatacatcaagccataccacccaagactgtaaactgctccccgtatgttcagataatcttctacatgtttattagtatggatttaaaatttttctctttgaaggtatgggatgctttgggttaattcctagatatttcatagtagaatttttcaaagtatgatatgaggacctctgcagggtgatccctgaagtctttattttttctaattatatattagaatatattttcatcatatgcctcaactaagacatcatacaggctcccaccaccacacccggctaattttttgtattttttttttagtagagacgaggtttcaccatgttatccaggatggtcttgatctcctgacctcgtgatctgcccacctcagcctaggattacaggtgtgagccaccgcgcctggcacatattgccacagactgaataaagaaagaaatgtgagcatcaagctgtttcctgccaagccaggacatacgatgtttttgctaaaacgtcaaacaaggctactcttctcacggaatgttttttcttaatgtggttatttgcctgaaaatgttacttatatttgtaagagttaaagaaagaagaaagaaacacgaaacatggcttggcagttaaagacaggtttactttagataaaacctgaggggggcttctggccaatttcagtcaggagaagtttctcttacacactaagagtacatattagttttagggtgaggggcttatcacaagcttggaatgtttctgtgtgggggagaagttttatggcagggttggaatgtctctgggaggaggggaggttatcttggggctgacatctttccggccgggtgggagtgatcttgaggctggcatcttcccagccagaggaggcaaatttcggggccagcatgtctctcactggggaggagtttggaatatttctggctggagatgttatttatggtttatggttgtgctgaccttagccattagcctgacaccctttggatttaggcggttttttattaaggggaattttagaatgaggggcttgtccaagatagtgatgctcctgctctgtcaatattagcatgcaataggttcattattgctcttttaaatgtactaataactaatattttaaatgattttcaattttcatttccaatatggtaaaaaacaatgatagttctaagccacaataaacaaaagccctttagagtgctcagtaatttgggtgtgtaaaggaatcctgagacatgtttctttatatttttctttatattttgtgcatttgaaattttgcttaggaagtctttcctcgtgcctagattacaaagttattatcctacactttctcctattaaatgtaaagataatggcaaagagtgcaactacttttgcaccaacctaatagtttgtgttgctgttgggaatcttccccttctctgtattcaacttctatttcttgaatgcttgttactggtgtgacactaggaggatcactgggatttttgccagctgaccttgccttctgcatcactgggctctgttattgttccaatagattataccatcattcttttatcttttatatgtagatgatcacgtctcttcgcttccagtcctcagataccttagatactttgtttctttttcttgccttgtaacatcactcacgactttcagctccatgttaaagaacagcagagttagtgagtatccttggctttttcttgatcctaaaataatgcatcaaaaagtttcttcatttagtgtatgtagtatttgctaattttgtgctatatattctatatttagataagaaaatctccttgaattttgtgttgtgaagtgttctttaaaaatcataaataggagtagagtttaagaaaaacatatttatgcctttattgaaataatcatgatttttcttttttaatcaactcctgtgataaatcatatgataggttttctgatgttagccatccttgtcatttgtgaaataaatctataccactttattatggtaaaccatttttaatataccattaaatttgactaggttatggttttattctggaatttaaaatctgcatggataggtgaagtaggcctatagttgtctctttttcttttttttttctttctttttattttttgagacagaattttgctcttgttgcccaggctggagtgcaatggtgcaatctcagctcaccacaacctccacctcccgggttgaagtgattctcctgcttcagcctcccaagtagctaggattacaggcatgcaccaccacacctggctaattttgtattgttagtacagatggggtttctccatgtttttcaggctggtcacgaactcccgtgatccacccgcctcagcctcccaaagtgctgggattacaggcgtgagccaccacccctggccaatttgtctcttttttcagcaaatattcttacctgattttagactgagattgcattaacctgctgagatgtgctggtcagatttcctaacacttttctatgtttttgaagctcatgtataagatactaactgtttcttaacataataataattgctaaactttaataaaacccactggggcaaagattttagagaaagaccatctttgactaccatttcaatttatttaaagcttatttgagcatacaaggtccccatttttcttgaaccagttttagaattttatatttttctgagtatttggtcatttcatctacaaagtaaatttattattttttaaaacttattaatttaaacatatccattttctctgtaattatttaccatttttaatttggagttttgttattggcaccttctccttgtttccctctatcttctcaatcttttctcatgcgtgattttggctttattaagcatgaacttttcttgaggcagtttcttgataaatctatttagtgccatgtatttccctcaaagtactattttaggttaaaatgttgacattcaatatttgaataatcatttaattctaaagctttcttaatttttataatttactgttgaacctgaagattattcaattatatagttagcttccaagcatatgagatttgaaaagctatttcttctctattaatttttaatgttaatgcattatcatttaaataacatttatactttggaattaaagaattttttatatcttaatgaaatgtcagtttttgtaaaagtatccatgtgcttgaaaaaatatttattctctggtgaagagtctaatatataatagctaatatttattaattgcattgtaattattaattgcattgcaattaataattaataaattacatttctgaactctgttaaactttctaactataatatctatctgtcattgatttagttattattccaggattattatccttaatattccaggatatatagtaatgtagacattatatttatgctgattgctataatgttcttttaaatggtatgaatattattctctatcctttagcgtgtgtgatttcaaaattttagcatgcatcaagaaacaacatttttcttcacagccgaaataaccagattgcacttttaaaaaataattagttgggcatggtggctcatgcctgtaatcccagcactttgggaggatgacataggaagatcacttgaggccaggagttagagactagtttgggcaagaatgtgaggcccagtctctatggaaaaaatttttttttaattagacaggtgaggtggcacacaactgtagtcccagctatttaggaggctgaggcagaggattgcttgagcccaggagttccgggatgcagtgaatcacgatcctactctaacctgggggacagagcaagacctgtctctaaataattagtaattagatcaataataatgctttaatattactcatacctaatcattcattcatactataatcaaaatgttctccattgccttaaaaatacttacagctggttatggaaatgaagattcaactggtcccctatgttgcatccagttgctatgtccccgaatctctcttatcttttggatgagcctttatcaatgagaccagaccaattgttctgtggaattatccaccttctgaatttttctgaaagcttcctcacattgtcatttagcttattcctccatcttctgtacaatgattattctttttgactagtgggcatcttttcaatctagtacttgcagtcttttaatattatcccattacttagtgaaggtttcatttcacactggtacaagatatccaaggctttcttccatgtccagatcacagatttgccatgtctcaaggaactctggttccctgcagtggcatatggtattaaagacattgtgatcactgtttccttagattccaccttttattattattaagattgcaacctcagcttttatttggtgcatatttgtctgacatgtatgtatccagccatttcttttcaaattttctgttcaatttttttagaatagtaaatgcaccatttgaaattagatggcataaatgagtaccaataaaacagtattaaaataaatgtaaatgggttaaataagcaactaaaagacaaagactcccagggaaaaaagatttaaaccccaagatcaaaatacatgttttctagaactggcacattatcaagagaacctgaccctgatcatctatgctggtctctaatggctccaagtattgaaccttttctttatgttagtcagtgttaatagaaacccaattagtagccaaaatctgacttgatcatctaatatagtgatctcatttgatctttgtcacattgctgaatgttaagaactattattatttattccattttacagatgaggaaagtgagacccagaaaattctgctggttgttgaatagcatagagctgttgagttgccatttggtctgtgatagagtctatgttttaaccactgtcacttaattttgtttctgatctcaccagatacagtatccatgcctagtcagaactatagcatcatatctgaatttaacctctttggcttctcagccttcccccagcacctcctgcccatcttgttcctgctgtacctcctgatgttcctgttcacattgctgggcaaccttctcatcatggccacaatctggattgaacacagactccacacacccatgtacctcttcttgtgcaccctctccgtctctgagattctgttcactgttgccatcacccctcgcatgctggctgatctgctttccacccatcattccatcacctttgtggcttgtgccaaccagatgttcttctccttcatgtttggcttcactcactccttccttctcctggtcatgggctatgatcgctatgtggccatctgccacccactgcgttacaatgtgctcatgagcccccgtgactgtgcccatcttgtggcctgtacctgggctggtggctcagtcatggggatgatggtgacaacgatagttttccacctcactttctgtgggtctaatgtgatccaccattttttctgtcatgtgctttccctcttgaagttggcctgtgaaaacaagacatcatctgtcatcatgggtgtgatgctggtgtgtgtcacagccctgataggctgtttattcctcatcatcctctcctatgtcttcattgtggctgccatcttgaggattccctctgccgaaggccggcacaagacattttctacgtgtgtatcccacctcactgtggtggtcacgcactatagttttgcctcctttatctacctcaagcccaagggcctccattctatgtacagtgacgccttgatggccaccacctatactgtcttcacccccttccttagcccaatcattttcagcctaaggaacaaggagctgaagaatgccataaataaaaacttttacagaaaattctgtcctccaagttcctgagcgccagtttggtggtgatgaaatataataatgtgtatctccatagggctgttgtaagtgttcaggtatgtgaaaatatgtgtttgatacatactagctattgttttcccttccctttttgcttaagctcaagtgatcataatcttttctttatgagccattatgatgacctttatcccattatctgtgcctagaaatgtgttttctgtccacggacaggtggggatcatcacgtggatgtgtctgggcacttatgaacacagttcttcttgaatggacaggcaaaaaagattttattttcccctagtgtaagaaaaagcaagaataacatgatagtcataaatgccacccagcactgagctttttctatgtattggcactgtgtccagtgttttataaatattatccttttaattagaagaaatgtacaaaggaaaataaactatttgcctcagataaactggtttcttatttaaagttcctcactgtctttgggagagatataccctaagtttgtgtgtggatattaatatgttgagttgaatgaaagatgttagaatgcaaacgttgagagagggcaagaaggagatatatatatatatacacatacatatatacacacacacatatatatatacatatatatgtatacatatatatatacatacatatgtatacatatatacatatatatatatacatacatatgtatacatatatacatatatatgtatacatatatatgtatacatatatacagagacagagacagaagaaagagagagagatacagagacagaagaaagagcaaaagacagagagagagagagggagagagagaaagcaggtgtcaagtaaaaagagagttctttaaattttttatctgtacaggaaatgtaataactaagaatttggggcaaaatagaaaaaaggaggttggtaatagggctttaatatgtcctaataatagggctaataaggtagcctaataagatagccacgtgtctcatcccagcgtttttgacacagttgctctgcagtctcaatgtgtcattctaagatatgtacttccttgcctccaatggatgtatcaattttctggttttctgtttctggccattggttccaccagctgaggaatgaatattatttttacagtgtgactgctcttctaatgctactcatagtgccattcacctgtgcttcctgctgctgctggaatgtgaaggtcaacatggaaagagatttcattctaggaaagcagagatcatggccttaaaaagtcaaaaggtgacatggttggaagaagttttattctttgtttatgttataaaactccaaacaaaaacaaactatcctttcccttatcctgcatactctgggcaagactcgcatgtgtgcttctcatcgttgcatgtctgctatggttgcaccatagcaaccagtgagagaccctctgggcatatggtcacagatgatgaagtgacatagttaatgatggaaatggcattaaatgtgtcctatgaaagtgctacagaagcagaactttctatacaaataaatcaaaaatttttccaagagccaagctgttgtgagtgttaaccactttgttacctttttcttccactttcttttgactcatgttgctatggtatatctttctccatctgtttacttttcacttatatatgcctttatatttacagggttttcttgttaaaaaaaaaacttatatctgagtcttatttttttgaccccctgtgacaatctctgtattttaattgatgcgttttaattaataattaactaaatcgtttcttactatagtcactctgttatgctagcaattactaggtcttaatcttcattcctactattttttagtacccaataaccattcccacttcccccggaagccccaactacccttaacagcctctgttacccattctactttctatcttcataagttcaattgttttaattcttagcttccacaaataagtgataccatgcaaagtttgtctttctgtgtctggcgtattttactgaatatattgtcctcaagttccatccatgtggttacaaatgacagaatctcattctgaatagtactccatcatgtatatgtaccacattttctttatctattcaactgttgatggacactttgattgcttccaaatcttggctattgtgaatagtgctggaataaatataggacagcaggtatctctttgatacactgatttcttttctttggggaatatacccagcagtgggattactggatgttatggtagctgtttttttcatttcttgagggacttccaaactgttctccatagtggtggtactaacttacatccccaacaacagtgtacaagggttcccttttctcctcatcctcaccagcatttgttatttcctatcttttggatagaagccatttttactgggataagatgatttcttattgtagttttgatttccatttctctgctaaatcaatgatgttcaggatcttttaatatgcctgtttgctttttctatgtcttcttctgagtaatgtctgttcatatcttttgccactttaaaaaacatattttgtgtctgtgtgtatatagtacgtgtatatatttatgggtcacttgagatgttttcatacaggaatgcaataaataataatcataccatgcaaatggggtatccaccccctcaagcatgtatcttttgtgttaaaaacaatcctgctatacttttagttattttaaaatgtacaattacattattattgaatatagtcaccctgttgtgctatcaaatatcaaatgttattcattctaactactttttgtactcattaaccatctgcccctgctcccccaatcacccatcactacccttcccagcctctggcaacttcatgagttcaactgttttgatttttagatcccacaaatatttgagaacatgtgatgtttgtatttctgtgcctggcttaccaaaacctatggaatacagtgagagcagcaataagaggaacgtttatagctctcactgtatcccataggttttgatatattggggttccattatcatttgcttaataaaatttttcaatttccttctcaatttctttgtggaccaactggtcattctggagcattttgtttaattcccatgtgtttgtatagtttccaaattttcttgtattatttctttccattttaggccactgtgatcagagaagatgcttgatattatttcagttttttgaatgttttcagacgtgttttgtaatcaaacatctggtgtttccttgagaatgatctatgtgctgaggaaaagaatgtatattctgcagccattggaggaaatgtcctgtaaatatcaattaggtccaagagacaacaaccttcttgtctctttttatagtttttgtcttgacatctatattgtgtgatataaatataggtactcccatgctttttaaacttccattgacatgatgtgtctttttctatcccatcattcttggactaagtatgtttttacaagtgaaatgtgcttcttgaaggcaacaaatcattgggtcttttttattttttaatccacggagccactctatgtcttttgattgaagagtttagtttatttacattccatgttatgattgataagtaaggactgtcttggaaaggctttatttctctttcatctttgaagaacattttcactgaatttactattctagggtaaaagatttttccttcagcactttaaatatgtcctgtcactctctcctggcctgcaaggtttctactgaaaagtccactgccagatgtgttggagctctattttatgttgtttcttttctcttgctgcttttaggatcctttctttaaccttaaccttttagagtttgattattaaatgccttgtggtagtctactttgggttaaatgtgctgggtgttctgtaaccttcttttacttgaatattgatatctttctttaggtctgagaagttctttgttattatccctttgaataaacactctaccccaatctctctctacaccttctctttaagaccaataactcttagatttgcccttttgaggctattttctatattctgtaggcatgcttcatttaaaatttttttttcttttgtctcctctgactgtgcattttcaaatagcctttcttcaagctcactaattctttcttgtccttgatcaattcttctattaaaagactcgtgtattcttcagtgcgtcaatttcattttttcaatgccagaatttctgtttgattcttttaaattatttcagtctctttgttaaatttatctaatagaaatctgaatttttttctatgttatcttgaatttctgtgagttttctgaaaacggctatttagaattctctgctgaaaggtcacgtctctgtatctcctggatcggtctctggtgacttatttagttcctttggtgaggtcatgttttcctggatggtcttgatgcttctagatattcatctgtgtccggtcattgaagaattaggtgtttattgtaatcttctcagtctgggtttgtttgtacccatctttcttaggaaggcttccaggtattcagacttaggtggtataaaatacgctgtatctgcattagggggcaccccaagcccaataacactgtggttcttgcagactcataaaggtaccaccttgatggtcttagatgacatttaagagaattctctggattaccaggcagagacacttattttttcccccttactttctcagaaacaaacatagttgctctcactctgttctaagcctccaggagttggggaagcactgacacaagcacctctgtggccatcagcactggagctgtgctgggttagacctaaaaccagcagagcactggatcccacacaaaacctcctatgaccactacctggctactgcctaagttcactcaaggccctgggactccgcagtcagcaggtggtgaagccagctggacttgtgtccttcccttcagggcagcgagttgccccatgccctgcgtgggtccagagttgctagcgactggtattattagtactgtgtgccagggactggcatcaaaaactttagaaatctacctggtattgtatttattgtggctgagctggcactcaacccacgagatgcagtccttcctactagggccattgacatttgccaacatgagtcacggaacctgttttaagtcttttaagtatattaaccaccttgttttgcattttacaaatgagaaattaagtccgggagatatttaagtgaccacccacagtcacacagctggtggagccaggctgtacacccccagactacccacccagtctcacattgtgccaccctcaccaccgggctgtgctccttcacgtctataaatgggcgtttcagcagcacccgcctcacaaggtcatggtaataactaaaacagacaatgcatgcaaaatacacaaggcagactaagggctcagcaagtgcaactcactgttcctgctgttactgcgattgctgtgtaagctggatatggggtctgatctggatcccacagggggcagaaacatggccttgcgctgtctgagagaagggccctaaaggtccagcctgtcctcaccacctgctctctttggctgtgggtaatggctaggagagcaacctcctggacacagggagccttggcctgaatctagaagagttttccatggagaacaacaggaaaccttgaactcctgccagatgttaaggcagactcataggtggattttggggaaggacatcagctattctggggctgggaactggacaacccatggagcccagcctcccatccaatgaagacgtaagctctgcacagcccagctacggcatccctgacagtctctacttagatgcctcccagcatggagagctcagcacacacacacgcacagacaccctattcgtttacagaatattagaaggtagatactgaatggcaatgggccttatgtaaccagtcataaaattgatgaggaggggggttgtttaaaatgtgtcttcctttacgtgcacacatatcaagggaggcaaatacgatgctaagagagtgaggtacagaacaccaggtatgtctgcaacattttcacagaaatgaggtggagagtgcataaatgcatatgcctctatttgtcatatttgcataaataaactctagcatgaataacttttcagcttaacatgtacttgtttatgtatgtataactatttatatgtttacatatttcacttgcaacatttattccatctgtgtgtataaccagtaatcctccccggtctccactctgtaggaccctgcaaggtgcctggtcattggactttctactgcaggagtgtgtgggatgcacctgagccagagttccctgcagcctaggaggccaaggaatcccagggcagtcaatgtccctggtgctgaaggagatggatccccttccttcccctgcaccctcctctcaccctcgcagcatcctccagacacctggacctgctgtcaggatccaaaagcagtgctttggaagccttagggaggtaaccactgattcccatgcttctactcacattggctgctcagcaaaagtaggaaagtccctactgcaaaaatgtcaatgtcccctctggtgcctggcaactgccagggccagccctacttcttgtatcttccatgtttgaaattttaacatttgaactcacacccgaggttgaccagaagacccagatagctctgagctttgcacctgtgacccactggtatggcattgctttcatgggagtaactgggatttggcagcctgatggggctgatgcactgatttgggggtcactccacatgaacccacactgaattcagggctgtggcatacagacagatcaacagcaaccttgggtgtgggtttctatgaacctgtgtgtctgactttgtatattcattttctggtgtcatctgtagtctgcagtaactaataagggcaaggatggtttttattgaagaagacacaccctttctataatagaaaatgtccaccccctgacctggtgcagtggtacacacctgtaatcccagcattttgggaacctaaggctggcaagttgcttgacctcagtagttagagactagcctggccaacatggcaaaaccccatctctacaaaaagaaatacaaaaaaaaaaaaaaaaaaaagcccaggcatggtggtacagacatctagtcataactactcaggaagctggggtgggtggattgcttgagctcagtagttagaaactagcctgggcaacatggtgaaaccccatctctactaaaaatacaaaaaattagctgggcatggtggcgggtgcctgtaatcctagctgcttgggaggctgaggcaggagaatcacttgaacccaggaggcagaggttgcagtgagccaagatcaagccactgcactccagcctgggcatcagagcaagactccgtctaaaaaaaaaagaaagaaaaagaaatacacacacacacacacacacacacacacacacacacacacagcccacgcatggtggtgcatgcctgtagtcccagctacttaggaggctgaggtgggtggattgcttgagcctgggaggttggggctgcagagagctgagatcacaccactgcactccagcctgggtgacagagtgagactgtctcaaaaaaagaaaagaaaaggaaaggtccacccctgtgtaaactgccaaatgtttcccttcttgctcagcaatatctctgctgttattatcaatgcatgtcatggggagatgacacagatattgagaaggcactttgcctctcacaggttttctccacaaatttagttcccctccatattgctggggaaagtagcttccccaagaatgtgcctggagatacctgttgcattctctctctctctttctttctttttttgatagggtctcactctggcacccaggctggagtgcagtggcacgatcatggctcgttgcagactcaatctcccaggctcaagcgatcttcccacctaagcctcccaggtatttgggactacaggcacatgtcgccatgcctggctaatttttgtacttttggtagaaacggggtttcgccatgttgcccaggctggtctcgaactcctgagctcaagtgatctgccaacctcagcctccgaaagtgctgggattacaggcgtgagccaccacacccagcctctggtgcattttcccttccaggtttcttgttacatgaatttgtaaagatatttgtcagagataaaggtgtggttatgacaacgtaggagttgttcttacaactcctttctcagagaatgcagtcaaagttgttcatgtataactcatgtataacttcaaaatttaaagacagaatatgatgcagcaaggaaaagtgagctaatatttgcagagaacctttcagtgatcaaacgcattgctgggaaaatttcatagattgtatcatttttgtgtcttttagcctagctacaatcataacttttcttttttctttggttttcagcagttttgactactgtgtgtctagggctttgtgtgtgtgtatgtatatatttgtgttcatgtttgtctatatgcactttttagaagttatccctttggaggccaggtgcggtggctcatgcctgtaatcccaacactttgggaggccgaggtgggtcgatcactttaggtcaggagttgagatgagcctagccaacatggcgaaaccctgtctctagtaaaaatacaaaaatcagccaagcctggtggcatgtgcctgtaattccagctactcaggaggttgaggcaggagaatcgcttgaacccgggaggcagaggttgcagtgagccaagatcatgacattgccctccagcctgggagagagagtgagactccatctcgaaaaaaaaaaagaaaaaggaaaaagaaagaaaagaagttatccttttggaattctctgagcttcttgaatctgtggttgattatctctcatacttcctagagaattctcagaatgtctgagtcccatacccactcctcatgtgatgtgtcctcagataagtgaactaacctctgaaactcagtttcctcatctgtaaagtgaaaataataatattaatgaggacatgatgattggcagttcataagcactggataatgtcagctatagatattgttaaagggtgtggtccttccttagaccgagcaaaattggcacttaactgggctctgcacctctgggacccacactcttcagtgtcttctttgaaggaggttctctgggacctgaaatcagccaggatgttcattgactccaggtggggcagtccaggccaacactgattctcagtcagtccaaccacaggaaaatagctccccccaaaaaaatgtccaaagtcccctttggtgcctggaacctggcagagcaagtcctgatccccagttcttccctttcaggcaatcatttattttattttatttttgagatagcattttgctctgtcacccaggttaaagggcagtggtgcaatcacagcttactgcagccttcacctcccaggctcaagcaagcctcccgcctcagtctcctgagtagctgagactatagataggctcataccaccacacccagctactttttgtattttttttgcagaggtggggttttaccatgatgcccagactggtcttgaattccttggctcaagtgatccacccacctcagcctcccgaagtgctgggattataggcatgagccactgtgcccaacctttgaggcaatcttgatcattaaccccaaatgtggggttgaccatatgtcttaagttgttctggacttctacttatgcttctttgtcatggcatttttttttatgaattcacctgggattttgttaatagtgcaaaagagtttattttggggtccattcatcttggacccaggaggagttacaggctctgggtttcaaatggttcaagatccaccacctgagggcctgaggtatgtggggacctgtgtttccaatcctgtgtgtttattatcaggcgctgtctctggtccacagcatccaaagagggcaggtatggtagcaggagtcatttcccctgtgcaccctcagctgctgacccctgatataaccaccagattattgtcagactctgagccacatgctcagccatgtctcaaagatggcctctcctccaaaggttttgacatcattgctctgtaacaccaatgagaccttccagccgatgttttctttagagcccttggtttggtgtctagccttatcaccaacatgccattgacctcagggagctatgagtctgtcttggtctgtttgaacaactatcacaaaatactgtagactgggtgatttgtaaacaactgaatttatttcccatagttctgcaggctgagaagtccaagatcaggactgtggctgatctggtgcctggtgacagcccacttcctggttccagaaggctgtttcatgcctgtgtcctcacatggtggaagtggggaatcagctctctgggcctcctttataagtacaccagtcccattcgtgagaactctgccctcataaccttatcaccactctatgcccccctccttctaaaaccatcacatggaatgtaaggatttcaacatatggattttggaggtacaaaaatcttcagtttatagcagacccaaacctctgaatctaggtttcctcattgacaaactagggataataatggcactttccctactagggagagttggttgtgttcatatcaatactgtatgtgccacctgctatgtgcttaaaacatctgcacggaggaatgttattacaggacgccgaacaccaggcttgagcatttggactttggcagtagaaaaggctctgtcattcaactccatgctggaggcatgttttgagttgttactgtattcccatcactgtcctagaccctaggaacacccagatagatcatatccagtcccagatacatgatctggcaaccacagtgcaatgtgaagagttgtgatggagacatcagctggacattatgaaaagatgtggaggaaggaatgtttcctctgggttttaaagggtcaataggagttctcttggctgacaaagaaaatagcattccaggcaaaaggactgaactcactaaaagtatggagtatgaaaatgcatgattggatatatctatgtgctagggcagtggggagggggagataatccctgactgaaggctgcactatggaatttgaactggatcctgcaggggccagagacatgactttgcactgtcttggagaagggccttaaaagctcagcctggctgggtgcagtggctcacacctgtaatcccagcactttgggaggctgagacgggcagatcatgaggtcaggagatcgagaccatcctggctaacacggtgaaaccccatctctactaaaaatacaaaaaaaaattagccagacatggtggtgggtgcctgtaatcccagctactcaggaggctgaggcaggagaatggcgtgaacccaagaggcagagcttgcagtgagccgagatcatgccactgcactccagcctgggcaacagagtgagactccatctcaaaaaaacaaaacaaaacaaaacaaaaacaaaagctcagcctgtcctcaccattgggctgtagacagcaactttgtgacaaccctccttggcacagggagactttcatctaaatccaaaagatatgtgtatggaggagtagtaacaggagctctagaacaactgctaagcattgagcaggactcacaggtgaattcttggggaagaggtcagctgctctggggtgctgggcaccacccagcttcagcatccccaagagccaataatctctgcttgaatgcccctcagcacagagagttcagtgtgtgtgagcctgtgcatgcttgtacacacacacgctgccttaacaaaacacgtaaaggtaaatactctaaagcagtaagcatcaaacataaccagttggaaaatcaataaggagggggattgtttaacatacatcttaaaatgctatgtgcacacatgtcaagagagttaagatatgataccaaggataagaaccaaatgcacaacaccaggtatagtctgcaatattttctctaagacagggtgaagtgtgagtaaatatatatactcatatttatcatatttgcatagatgaactctgaagtgaataattttcaacttaggatatattaaacctttatttaatttcaagtgtggaggattttctttctcttttgacaatcagtgcttctcccaagcccccactctgtgggaccctgcaaagcgctcaggccttggactcttaactgcaggaatctacaggatgcacatgagcaagcaggcgctcctgcagccacagaggccaaggagtctcaaggcggtcgctgtccctggtgctgaagagggaggagcctctacaccccctgcaccctcctctcaattcccagaacacctggcacaggatgaagtccgggttgtgcttcacatcagcctgttcctgggtcactgggagattcaaaagaagagctatcagggactggcaggggtggccaggagtcctcgggaggtgtccactgagtccccagcttgtgctcactttcgccactcagctcttcctgcagctatatcagcttcttagaggatagtgggtggaggatgaggtcaaatgtgcaatccccagcccccaaccccactccagggttctcagaacccagaaaccctccaggatctgtggttcaacccagcttttttctagctcctgtttcagtccccaaggatcagaggatttgtccagctcccactgcacactgcccccaggaccagctctactcacccctgacagcaggcccactagtatcccccaattcagaactccagaagctcccccggtgagctcagctacatggtggtggctgactccgggggtctggagggtggtcaggacaatctcagagggagagaagggccatgcagccagtgtctgggatggggcttagctctgtgggcctgtgggctactcttttaaaaaaaaaaattttgagacagggtcttgttctgtcaccaggctggagtgcagtggtgcaatcgtggctcactgcagccttgacctcccaggctcaagcagtcctcccaccttagcctcctgagtagctgggactacaggaggatgccatcactgtgggctgctcttgaaaaagagctgcttcctctatttctggaaattctcctcccctccctttatcctctctcgatactctctcgaccccctccccaagcccacactgcatcctacacacacctgatgccctttctcttagaagttaccatgtgccacttctgctaaataacatcctctcgccatctcattaattgcttacagcagcctctgaggtggattcatggtgaaaatgatgacactgaggctggatgaggttgtggctctcacccagggatgtacatcttggaagatgcagagctaggacttgaatcagctctgcctgaccccagagcctgagttcttaccacaaagccaccctgccaccagaccctgatgttctcgtcatgttcaccactggctgtttgtaaggggtcacttgccattgagtcttgctccaagttcacctgatgaaacacatgaggtgtctccaaggctggggacaaaaaagaggacacagccccctctgcatcccttgccatccccacagcagtcgagctactccaaggccctggctatcccttctttttcatctctgccctgactctgtggggtccttcatttgcgagatgggaactggggatcttgggtcactccaatcaccccagaccacaccaggccagccccggctcttttatcagaacaatgccgagaaaagtgaccactacaaacagagtcagggtcaccgtcaggcgatgaactccagggatttaatgtttgatcccatcattctggggagaaattaattcaaaggaggtctggtagcagagaagtacccaccaacggacacgccctgacctcggggttttctggttcactctctggcccactgggggtgaactttctgatgttgagttctgtcctgataagggagaagatatctacatgttgacctctcctctccctgcctggactctggattctaggttgaagtattatttatgctgaggatttacaatgtctgatatatctcgctgagccttctgcacagagatacactgggagtggaggctaatcatgtcaaaggagaagcaccataagcccacactccagcctatcagagtggattaaaggtctaccctgcccaactcttacctcacctgctcccatggcctgggtggagggttggaccccaggactatgaggttgtgtggagacttccagccccatacctgccctcagaccagtcttcagctcactctgctctgggctgcccagatttatttatttatttatttatttatttatttttggagctggagtctcgctctgtcacccaggctggcacaatcttggctcactgcaacctctgcctcctgggttcaagcaattctcctgcctcagcctcccgagtagctgggactacaggcgtacaccaccatgcccagctaattgttttgtatttttagtagagacggggtttcaccgtgttgcccaggctggtttcaaactcccgagctcacgcaatccgccctcctcagcctcccaaagtgctggggttacaggcatgagccaccgtgcccagcctgggctgcccagatttacacaaatattctccactttacacaactctacacaaatattctccactagttcttaaaagaaaactgcctccatcaaatctcacacatttccttcctggctcagtccagggagaacattatctagatagcttgtcatcaaataaaatggtgggggagagaactcaggcagaggggcacaaaacggattgagcagcaagcttcctctccaaccatgattttctgtccatggtcatggatactccctggactgctgccagcacatgtggttcatgctaggtttctggtcaatgtagcatccaaaatctcacatcttctttctagatggagctgtggctatttcaacttaggcaagttgtgcttgagaatcttctcctttaacactacagggtaaggtagttccccaatgcttttatttactttcatttacatttagaaattaggaatttaattcaacaagaagagaggagagaatcgctattattgagtggtttctacttccgaatcctgtaatcagaattttttctgtaattattacagtgctaggaccctcagagctttaaagccctttttcgagattccaaagctagtaagtggttctgctggcatttgaaatataatgtcactgggtttaaaattacttttcttgggccgaaggtggtagctcacttctgtaatccagcaccttgggaggtcaaggtgggaagatcgcttgagcctaggagttctagaatggcctgggcaacacagtgggacttcgacgctacaaaaaattaaagaattagccgaggctaggcgcagtggctcacgcctgtaaccccaacactttgggaggctgaggcgggcagatcacctgagcacaggagttccaggccatcctgggcgacatggtgaaaccccatctctactaaaatacaaaaaattagccaggcgtgatggtgcatgcctgtagtcccagctactccggaggctgaggcacgacaatcgcttgagcccaggaggcagaggttgcagtgagctgagatcaagccactgcactccagcatgggctacagagtgagactccgtctcaaaaaaaaaaacaagaattaagaattagcctggtgtggtggtgcatgcctgtagtcccagctactcgggaggctgaggttgggggctcacttgagcccaggagtttgaggccctgattgtgccacagaactccagcctggagttcagtgacagagtgaggccctgtctcaaaaaataataaaaataaaataaaattagttttctttcctgtatgccactctgcctgactaaccttaaaaaagtaatctctttaaacacctgtgcaatttacctaactatatttttcataatgtcctttgacctttatacttattacataaatattttacatgcttatcatttaaatatgtaaacaactgatatagaccttgtgtttctcataatttttatcagctacataatgttggatcatatttatacactatcattcacctttgatctatccaaaatatttgaggaaggagaaagaaaagaataaagaaataaagtgtgatataccatctaaatgggcctacaattgctgaacattgatctgtttccatatcataaaaatattcctaggtttggtgcagtggctcatgcctgtaatcccagcactttggggggcctaggcaggtggatcacatgaggtcaggagttatagaccagcctagccgacatgatgaaaccccgtctctactgaaaatacaaaaattagccaggtatggtggtgtgcgcctttcatcccaggtactcaggaggctgaagcaggggaatcacttgaaccccggaggtggaggttgcagtgagccgagattgtgccactgcactccagcctaggggaaaaaagtgagaccctgtctcaaaagaaaaaaaagaaaaaaaagaaaaaaaatgtgacagacaatctgaataggcctacaattattgaaaattgtttccatgtcacaatctgtttccatgtcacaaaaatatttctctctagtattttgttctgacagctcaaatatagtaggagaatactaattttaaaaagagaaatgaatcaataagtaattaataaacaaccttccagaacagaaagcctcaagcccagattgatttcactgataaattccacgaaacatacaagaaagaaagtatgctaattttctactatctcttttggaagacgaaagcagagaaaatatttctcaactgtttctatgagaccagcactgcgctaactactaaagcaggcaaaaacattaccagaaaataaagaaaaaaaggaagggaggaagaaaagaggtaagggggaaatggagggagggaagaggaaaggaagggagggagggagggaggggcggaggaagaaaggaaataagaggaaacgatactgaccaatatttctgatgaacatagatatctcaataaaatattagcaaattgaatccaacagtgtataaaaacaactgcacaccacaaccaaatggcatttatcccaggggcataagattgtttgaatatttataatcagttaatgtaaaccatcatatcaacaggctaaagaaaaaattatctaatcataacaatggatgcggaaagagcatttgataaaaaaattaaacaccaattcgtggctttcttaatgctcagtaaaataggattggaagggagcttcctcaacttgataaagaatatgcaaaagtaccctacagctaacatcatacttaacggtgagaagctagaagcttttccgccaagatcagcagtaaggtaaggatgtcctctcttaccattgctgttcaacattgtactggaagtcacagttaatgcaataagataataggagaaaattaaaagtactcagattgtggctgggggtggtggctcacgcttgtgatcccagcgctttaggaggctgaggcaggcagatcatgtgaggtcaggagttcgagaccagcctgtccaatatgatgaaacccagcctcaactaaaaatacaaaaattagtcgggcatggtggcatgcacctgtaatcccagctacttgggaggctgaggcaagagaatcgcttgaacccgggaggcagaggttgcggtgagccaaggtcacaccattgcactccagcctgggcaacaagagcaaactccatctcaaaaaaaaaaaaaaagtacgcagattgtaaaggaagagacaaaactgtctttgtttgcagaagccatgattatctatgcagaaaagtcaaaagaatcaacaacaacaaaaaaaactagaatttataagtctttatgaaagtttgcaggatataaggttaatacataaaagtcaatcacttttctatatagcaatgaacaagtggaatttgaaatcaaaaccacaataccattgacactggtaccctgaaaattgaattacagatgtatgaatctaacaaaatatgtacaatatctataggagaaaaaggacaaaactgatgaaaaaaatcaaagaactaaatgaatagagagatattccacattcatgattaggaaaactcaatgttttcaagatgtcagttcttcccaacttgatctatagattcaaagcaatctcaataaaaatcctagacaggtttgtgaaatggggaaatgattccctatttaataaatggtgctgggaaaactggctagccatatgtagaaagctgaaactggatcccttccttacaccttatacaaaaattaattcaagatggattaaagacttaaacgttagacctaaaaccataaaaaccctagaagaaaacctaggcaataccattcaggacataggcataggcaaggacttcatgtctaaaacaccaaaagcaatggcaacaaaagccaaaattgacaaatgggatctaattaaactaaagagcttctgcacagcaaaagaaactaccatcagagtgaacaggcaacctacagaatgggagaaaatttttacaatctacccatctgacaaagggctaatatgcagaatctacaaagaacttaaacaaatttacaagaaaaaatcaaacaactccatcaacaagtgggcgaaggatatgaacagacatttctcaaaagaagacatttatgcagccaacagacacatgaaaaaatgctcatcatcactggccatcagagaaatgcaaatcaaaaccacaatgagataccatctcacaccagttagaatggcgatcattaaaaagtcaggaaacaacaggtgctggagaggatgtggagaaacaggaacacttttacactgttggtgggagtataaactagttcaaccattgtggaagtcagtgtggcgattccttagggatctagaactagaaacaccatttgacccagccatcccattactgggtatatacccaaaggattataaatcatgctgctataaagactcatgcacatctatgtttattgcagcactattcacaatagcaaagacttggaaccaagccaaatgtccaacaatgatagacttgattaagaaaatgtggcacatatacaccatggaatactatgcggccataaaaaaatgatgagttcatgtcctctgtaggaacatggatgaagctggaaaccatcattctcagcaaactatcgcaaggacaaaaaaccaaacaccgcatgttctcactcataggagggaattgaacaatgagaagacatggacacaggaaggggaacatcacacatcggggcctgttgtggggtgggtggaggggggagggatagcattaggagatatgcctaatgttaaatgacgagttaatgggtgcagcacaccagcatggcacatgtatacatatgtaactgacctgcacgttgtgcacatgtaccctaaaacttaaagtataataaaaaaaaatcctagacagttattttgtgaatatcaacaacttgatcctacagtttatgtgcaggggcaaaagacccagaatagccaacacaatattgaaagattaaaacaaagttggagggctgacactatccaacctcgagacttaccataaagctacagtaatcaagaaaatgtcatatcagtgaaagaaaagacaaacaggcccatagaacagaatagagggcccagaaatagatcaacgtaaatacagtcaactgatgtttggcaaaggtgagaaggcaacatgatggagaaaattagtcttttcttttcaaaaaaaaagaaatggtgctagaacaactggacatccacacacaaaagaaaatctagacagagatcttacacccttcacaaatgtttattcaaaatggaccatagggctgggcaaggtggctcaagcctgaaatcctagcactttgggaggccgaggcgtgcggatcgcttgagcccaggagtttgagaccagcctgggcaacctggcgaaaccccgtctctactaaaaatatgaaaaattagccagtcgtggtggtgcttgcctatagtccctgctactcagaaggctcacctgagctcaggaagttgagcctgtggtgagccaagatcgtgccactgcactccagcctgggcgacatgagtgagaccatctctcaaaaataaataaataaatgaatgaaaataaaaactaaataaatatataaatatataaaataatttaaaaatttaaatggatcatagatctaaatgtaaaacataagattataaaactcttaggaaataacatagagaatctagatgatcttgggtttggcaataaatttttagatatgacaccaaaggcataatttataaaagaaaaaatgataagctagacttcatcaacgtcaaaaatttctgttctgaaggctgggtgtggtggctcatgcctgtaatcccaggactttgggaggctgaggcaggcagatcacctgagatcaggagttagagactagcctgcccaacatggtgaaaccccatctctaccaaagatacaaaaaaattagccaggtatggtggcacacacctgtaatcccagctacttgggaggctgaggcaggagaatcacttgaacccgggaggtggaggttgcagtgagcagagatcgcatagctgcactccagcctgggcaacagagtgagactctgccacaagaaaaacaactaaaacaaaacaaaacaaaaattctgctctgcaaaagacactggtaagaggataaaaagagaagccacagacagtgaaaaaaatatttgcaaaagacatgtctgataaagtactgttatccaaaacatacaaagaacacttaaagctcaacaataagaaaatgggcaacccaattcaaaaataggcaagaggtctgaccagacacctcctcaaagaaggtatgtggatggcaggtgagcttaggagaagatgctccacatcctatatcatcagggaaatgcaaattaaaacaacaatgaagtatcagcacacgcatattaaagtggtcaaaattcagaaaacttacagcaccaaatgctggtgagaaggtggaacagcagcaactttcatcattgccgccgagaatgcaaaatggcacagtcactttgaaagacagtttggcagtttcttacacaactaaacatactcttgccatacaattcaggatatgtgccccttactgtttacccaaaggagttgaaaacatatgcccacacactgtttatagcagcatactgatgttcacagcagctttatttataattgaccaaacttggaggcaatcaagacgtccttcagtagctgaatgggtaattaaactgtgatatgtgcaaacaatggaatatattcagcatgaatagaaatcaaccacgaagtcatgaaaagacatgaaggagcttaaatgcatattacaaagtgaaagaagccaatctgaaaatgctacatattgtattattccaactatacaatattcttgaaagggaccagcctgggcaacatggtgagaactgtctctacaaaaaaaaatatatatatatacaaaaattagccaggcaatgcggtacatgcctgtagtcccagctactcaggaggctgaggtggaaggactgcctgagtccaggaggcagaggttacagtgagccatgattgtgccactgcactccagcctggatgacagagggagaccaaagaaagaaggaaagaaagaaagaaaaagagagagagagagaaataaagaaagaaagaaagagagagaaagagagagagagagagaaagagagaaagagagagagaaaggaagaagaaagaaagaaaaaagaaagaaagaaaggaagaaagagagagagaaagaaagagagaaagaaagagagaagaaagaaagaaagaagaaaagaaagaaagaaagagagagaaagaaagaaagaaagagagagagaaagaaagaaagagaaagagagaaagaaagaaaaagaaagaaagagaaagaaagaaagaaagaaagaaaagaaagaaagagaaaggaagggcagggcagggcagggcaaggcaaggcaaggcaaggcctatggagacagtaaaaaatatcagtggtttccaggagatagagggaagggaaggatgagtaggtggagattatagaagatttatggcagtgaagctattttgtatgatactataatagtagacacatgtcattatacatttgtccaaagccatagaatgtacaacaccaagaatggactctaatatgaactatgtaccgtgagcgataataatgtgtcaatgcgggttcattcattttaacaaatgtgccactctggtaagggatgttgatactcaagaggcttgtgtgttaggagggcggagtaagggtgtacaggaactctgtgttccctgatcaattttgctgtgacactaaaacggctctaaaaaataaagtctattgtccaggcacagtggttcacgcctgcaatcccaacactttgggaggcttaggtgggagcatcgcttgagcccaggaactcaagaccagcctgggcaacatagcaaaaccctgtctctaaagaaaattaaaaacattatccaagcatggtggcgcacctgtggtcccagttactggggagtctgaggcgagacgatctcttgagccccggagttcgaggctgcagtgaaccatgatcacaccaccacactccagcctgggtaacagagcgagactctatctctaaaaaatgtctattttaaagaagttttaatacatgcagtggaaacacacaaaaaataagtcagatgctacaaagtgatctgtgaaaactgaatttcccttccacctgcaaaacttagtctcctaagacccactaaatttaattgccagttcataaatgtatctcttccagatacactttagaatcttcttgttgagttccacaaatatcctgctgggatttcatttggactgcaatgatttatttaattaaattttattttattttaagttccaggatacatgtgcaggatgtgcaggtttgttacacaggtaaatgtgtgtcatggtggtttgctgcacccaccaacccatcacctaggtattaagccccgcatgcattagctatttatcctgatgctctccctccccctgaccctcccaacagactccattgtgtgttgttcccctcgctgtgtccatgtgttctcattgttcagctcccacttctaagggaaaacatgccatgtttggttttctgttcctgtgttagtttactgaggatgatggcttccagctccattcatgtccctgcaaaggacataatcttgctccttttatggctgcctagtattccacggtgtatatgtgccatattttccttatccagtctatcactgatgggcatttgggttgattccatgtctttgctattgtgaatagtgctactgcaatgaatttataggttcgttcaggtatcttcccatttaattttgtgtttgtgcttgaaatttatgagaactgtttcatgatccctcgttttaatagcaccattttcttctctgggtgcactgtcatgtgaagaagtctctggagagaatagtgaggagtcaagctcctggttaaaaacctacgtgagggcaggcacagtggctcacacctgtaaccctggcactttaggtggccaaggtgggtggatcacttgaggtcaggagtttgagaccagcctggccaacatggtgaaactccatctctactaaaaatacaaaaattagccgggtgtggtggcaagtgcctgtaatcccagctactcaggaggctgaggcaggagaatcacttgaacccaggaggtggaggttgcagtgagccaagatcacgccactgcactccagcctggatgacagagccagactctgtctcagacaacaacaacaaaatcccctccatgtgatctttcaagcctgaccgtaggcaattatagaattacagaggctttaactggcagggctcatgggggaaattgtcctccccacaccagacccagtgcataatcaatgcgtcacagtctcctaggagagttgcagtcaaggactcgagtccccttgaccagccatggtcttacacgtatctcctttcaaagttacctttattagttaccttcagcggagggcttccttgggcacctctgccaagacatccttgtcatagaaaaacaggggaaacatgaagacacactttcacccactatgactcagtacccagtacttttccacacctagcccttcctcctcttcctccccttagcctccattccataaaactgcagaagccttttgttgtaggattgtgcagcagtgagatgacccccacgtctgtgcaatctaccttaccctcaaatcaccatttggtgatgcgagtgggaaaaaatggaatggtagaagctggtgctttctctgatggagcctcattcctgtgctatcacagcaagtgatgaaagtcttgactgttgctttagtgtgggtgatatggtttggatgtgtccccacccaaatctcatctagacttgtagttcctaaaattctcacgtcatgggagggatccagtgggaggtaatcgaatcatgggtgtggtcactcccatgctgctgttctcatgatagtgagtaagttctcatgagatctgatggttttataaggggcttttcccacttttgctcagcacttcttgctgccaccacgtgaagaaagacgtgtctgcttccccttccaccacaactgttaagattcctaaggcttcccaagccacgctgaactgtgagtcaatcaaacctctttccctcataaattacccagtctcagttatgtcttcattagcagtgtgagacctgactaatgcagtgggcttgctatcttcactgggtccttcaacactgggcagctcagctctctctccttcttagctgagcccatgacaaatggaaatgagcaaattattgggctgtcttttcttccttctgttgggtctgttgcttggagattagttctgtttcatctggttcttcctcttttgaggcaagacaatagcagagggaattggagaattggaggctggataaaggatggaatgagtaggagtagaagcaggataaagaggtgggtgagcaagaagcaagataataagcagaagttgagcagccaaaacaaaggtgagataaaataagtgagtaaagagaccccatggccagcaagatctggaccaaacctgtcaggggcagctcctcagagatgggcatgtgcatttgaggaaaaggtatccttaaaatgaccgcacatgatcatcagctacttaaggttcatgcatatggactgcatatcgtgcatgtacttaaaagtatgggatggaggcaacatgcaagtgcacaagggtcaaagtaactaagtaacccacctatcaatcaaaaggcagacactggctaaagattaggcagccttgggaaaagaagagaaaaaaacatatcaaagaaacccaaatacacctaactggtgctgatctcatttctcaaaggtcagtccactctcccttttccaagagtgtaatactgtgcttaataaacttttgctgctttgctatctgtgtgcatctcacacaattctttgttcagggcatgaagagcctggaacagcgtgataccatctggtaacactttaacgcccttaggtaaatgctgggtaaacatggattgccctgctgatgagtgagggaccatgttgattattattgcttttgttctctttggttttagatttacttccacatcaggccttttggtagatgggtgggtcagaccctatcaacaggcatgggttgggggcttgcaggcagcctcaagactccttccccatagctaaatttaggaagacttgacttgggaaggctgaggctttcctgaatttcttttagtgttctattctttgttgcattttttctctgttcactgtggagatctggagcaagcgctcattggatgtacttctcccccagactccaaaacccattgggatgcaccactcccacacctatagagagaggaagagagggagaggaggaggagagagtggcagcatctgtcctttctgagaatgtgaactgagacgccaaaacagatgcccctgtatcaactaagacgggccctaacattaaggagagtgaagcagtgtccttgtctggggtaaatgctcaaggttcttgtctcatgccagggaaattgaggatgcagacacacaagaagtgagtttaagagtggaagtttaataggtgaaagaaagagaaaagagaatagctctctcttctgcagagagagaggggctcccaggtgggacttccagtccagcaaagtgcatggggttttatagactagcttgatgaggcagtgtctgatttacaaaaggcccaaagattggttggaccaggtgtaccatttacatactgcgagaagaagctggccaccccaccctaatattttattatgcaaatgggtaatctacctgacctgcgccacgttacctctttctttactgtacatgtggttgacaaagaaaaggaaagatggagcagccatgttgaacatgtctagtgcccaggcagccttttcctattggcacagctgctatgcaagcttccatcttgcttatctatctctgcagcttgattttacaggctgctgtttattagaaaagaaatgatttggggttgcttttcattaaaaggaaaaccttactgagtgaggctaagagtgaaggattaataggcaacagaaagagaaaagagaatagttctctctcccgcagagagataggggcgcccaagtgggtcttctagtcccgtggcaaagtgcacagggttttgtagactggcttgaggaggctgtgtctgatttacatagggcccaaaggttggttggaccaggagtgacgattacatagtgctgcaaagaagctggccatccaccctaatctttcattatgcaaatcgattttctacctggacagcagcatgttgcctgctccttactatacacgtggttggcaaagataagggaagagggagcccccacgttgaaaatgcctggccctcagatagccttttcctactggcacagctgccagcattctcccttgcaagcttccagcttgcttatctatgtctgcagcctgattttacaggctgcttttgttagaaaacaaatgatttgggggctgcttttcattaaaagggaaactttactgaggactctcttaccctcactacctgcctaaataatttctttttaatgcctgtatcatttaggatagaaattcccaggatccgtggtgcttccatagcaaaggaagaacgtctccagggagatgactttacagttgagccctggatgatgagattcgatcatgaaagaattggagaagagcatcctgagggcagggacaggcaagtcaaaaggtcccaagacaagaaaagatcatccatgcgggggccaaggccagggtggccacgaagaagggagaagagctggagaggagatgtgaagagttagcagggctcagtggtgcacagtcccttaggctgtgaaaggagatcagcatctgtagccgaattttattttgagacattaactgaagctccttctattctcctaccccttacccttccaggtgctcccactgacagagcaggagcatcgccatcttggacaagcaccaccattttaaagtttgccttgatcaaaactgcctaaatccaaagggcatcagcctaatggctaaggtcagcatgaccataaaccacaaatgacatctccgaccagaaacattccaaccctaagataaacccctccccaaccagagacatgccagccctgagataacctcccctccagccggagagatgtctgcaccaagacaatctcccctttgaccacagacattccaaccctgccataaacatttcccccacaaagaaacattccaagcctgtaataagctctctcaccctaaaaccaataaatacccttagtctgtaagagagagtgctcctgaccgaaatcagccagaagcccctatcaggtctattctccaaaataagcctgtctttgttgagcttctttttgtgtttctttcgtctttctttaactcttacaccaccactcttggaaaacattgccgcctatatgcacagccctctaggggtaacgctgatccaatgagcacaaatatttcaatttttgctttggatctccaagacactgtcctaaaagtcatggcagaaccaactgtcttgaaaggcaacatgctttaatagccaggctttctgagagaggaagtaataatgggcagattttttgagcatttactgtgacctggcactgccctgagtcctttacacttagtcctctggacaactctgaggtaggtagtgttgtccccattatatggttaggacgctgaagctcagagagggaaattaacttgcccaagtcacacagcagaaccgagatttgagcccaagcagtccagttccagatcccgtgcctttgggtgatgtctgcttccaatggtttggctttgaatctcaagggtcaaaagggatggctctgactccaatcccaccccaagatgggccagggagacctgtgctgggaatggaggagaaacctagagatgaaagggtggggcccgtcctcccactgacactcatgagagtgccgggcacacagtggaggagggaatggtgggagggggttgtggtagcacctgttgaccaggctgcctgggcagcatcagggagcccagaagagaaagggagggggctccctgaaggtaggcaatgggggctacagaggaaagcaactagaagggcagacatagcagggggacattggcaaggaaaggaactaaaaattctgaagcgccagccagggcggaagatgcacccctctttccctgtgctctgggctggccaagggcctctgtcttgggggcaccagcagcccagatgaatggatctacctctacaggttcttcttccttactcagagcctcagtctttctccttaaatgcctttataaccctggtccctctcctgctcaaatacctcccatagctccctattgcccactggataaactccatagttggcctccaagagaacctgctaccagagtgtaggtctcgtgttcagccagggaggcagtcagggtgttgctctcagagatgcccccctgccctgatcccctgcctcccactgacccagcccacctctgaatcctcacagtccccaagcaccccgtgatggctctgggtgagactcaggcaaagaggacagcacagttttattcatgggattctgcaaaggtgtgggtgggtggcttgggtggggtccaaggccaagcggctatgggtcactgtgggtctgcgctcaggggcttcacccacagccaaagtccgccctctgcatacattatgacctccggcttcctgcggggctccatgtggtctggacagacacggaagcacagcagcgtgagcgccaggaccaccttcatctcagccattgcaaacgcctgcccaatgcagttcctggtgcgggggaagggactctgactgcacccaggacccgcatcccggccccatccctggccccagaccctgaatcaggcccacacaactctgagtttttacacttagtcctctggacaaccctgaggtaggtagtgttgtcaccattatatggttgggaaaataaagctcagagaggggaattaacttgcccaagtcacacagcagagctgaggcttgagcctaagcaatctgatccagatcccatgcctttggggtggtgtttgcatccagcggtctggctttgaatctcaagggtcaaaagggatggccctgaccccgaccccaccccaagataggccaaggtgggctgtgctgggaatggaggaggaacctgtaggtgaaagggtggggattcgccctccccgtgacactcttgggagagcgcctggcacacagttggggagcgagagggtggtctcaggaagcatctgttggccaggctgcctgggtagcatcaggggacccagaatagaaagggagggggttccctgaaggcaggggaagtgggtcacagagaacaccaaccaggaggggcagacagagcagtgggacatttgcaaggaagggaactaaggattccaaaagccagccagggaggggcagagaagggagctaactgtgcctgggacccccatatgggcttgcatatccccggagcctggcccagactccagccccagctgagaccagcagagggggtgggggctctgagcatatcacagactattcttggaactacccaaacctgttctatggacctttgcccataaactccagaggaggaaaggaaaggaaatctggaactgggaccatctgcaacatcctcagttttcaagccccacacccatcaccccatccctgcctcagacacaggccacccttgtctggaccctgctgagaagggaataaaagccagaggtgatctctctttgctattctctgggtcaaagcggaaggggtcatagacctggaggtgagaccaagaagggttgctgggtggggtctcccaggtatgccagccttggagagacagacagttgtgtgtgtcttggagggaggtgatgttggattctcttggtcaaaaccctgccccctcctctaggacccctaaaatggaccttaaaaaggggggtattggggaggcagcacctcagggtccagccacacagttgggttgtggtgagtctcaaaattactgaagagacagacaatgcctgtaggagagaagggggcagtcaggacaaggtccccctgcctgagaggcccctcttcctacccaggaggcacctccccatgaggctgtgggcacctttggggatgactcagccgcctgggagcacaatgtcctgggtgcagcatcgggagatgacagggactgggggatgcagccacaggctgtccttaatgtacatggtcaggaagggcagctgggccaggtcatccctaaagaaacacccagccccaatcattatcaaggtagcaaagacacaactctccagttctctgtttgcaagtgagaccttttctccctgtaacgaactccacatggaacaaatgtttgaggattagaaaaccagaaaaaaaaaatagaaagattccaaagaaaatttaaccaggtagtttaaaaagacatattttttaaaaaatcaaaatgccaactgtaaaataaaaaaaatgaatttgcataaaaataagtattctttgtgacaagagagcaaactcataatccaaatgaataagaaacaaaatatactttcaatgttttgctcatattcatcactgcactagagatactagcaaatgcaattagacaagggaaaaagagaatatgtaatttgaaatgtggggtaaatgtatcattttggaacagtgattctgagtcttttaatagagtttaaaatttgcttagatatcttaggcatattttgttaaatccactcctagatacttttgttgctatggaaaaatgtgtcaccttttatttgggttcagggaaatttatgaattcatttggaatatagagattttgtgtttcttgttaaatttaatccaggtattttatattattattattattattattattattattattattattggcatcttttctttcatgctgttttccagctggttgttatttctaccaagaaagactaatgaatacatataaattgtgtgcccaatgaacacagtacatgctaaaaatggtgtctcatatcaatagcaaaattattgatcatttaataaaagcccttgggatgactggggaacagcatggaaaaagagtaaacttaacctggttctcatgtcttataacaagataatgtccagatgaatcaagtatttaaaaaaaatttttttaaagaatcttaaaagctatagaagaaaccatgggaatattattttatacttccagattaagaaaaccttattttcacacaggtcccaggagatatacaagaagagagcaatatgtacttaaacgagaaaagggccaggcgtagtggctcaagcctgtaatcccagcactttgggaggccaaagcaggtggatcacaaggtcaggagtttgaggccaggctggccaatatggtgaaaccccatctctactaaaaatgcaaaaattagccaggtgtggtggcctgcacctatagtcccagctgcttgggaggccgaggcaggagaattgcttgaacctgggaggtggaggttgcagtgagccaagcccatgccactgcacttcagcctgggcaacagagtaagattctgtctcaaaaaaaaaagagagagagagagagaaaagatacaaagcagtccatgcagcgtatagtatgttactgtggaattttttaaagatgctaaaagtagctctggaaaaatacataaaaatataataacttagacaatctgtgtgcgtgtggaatttgggtggttttggccattggggtgagtaaactttatagattttgaaccagttaagtgcattggtattaaaaatttaaacagccacacaaaaggaagaaatgtcaagaaaaagaattcagctcccttactgggtcatcagtgtttgtaaaagttttctgatggattctcttgtttcttttaagtacagaatcagaatcactgtctgccaaaatgatacatttacccccacatttcaaattacatactcttttttccttgtctaattgcatttgctagtatctctagtgcaatgatgaatacaagcaaaacattgaatgtatattttgtttcttattcatttggattatgcgtttgctctcttgccacaaagaatacttatttttatgcaaattcattttcttttttcttacagttggcattttgattttttaaaatatgtctttttaaactacctggttaaattttctttggaacctttcaattttttttttgtggttttctaatccccagacatttgttccatgtggagttcgttacagggagactagatggatatccaatccacacactagggtagaatgtatcactgctatgtgaagtaacccattttccacatatcaatcatatatccaagtcaaccaataaaatatattcaaatcaactttaaaaatctatctgattttttgaggaagttgataaacatactctaatttttttctgaaaaataaaagatcacgaagaactaagtcaatctgaaaataaaatttaaagagagggaagtcattccacccagtattacaaactattacaggctgggcatggtagctcatgcctgtaatcacagcatttggggaggtcaaggcaggaggatcacttgagaccaggagttcaatacaagcttgggaagcaaagtgagatcccaacttgacaaaataatttttaaaaaattagccagatgtggtggtgcaggcctatagtccgagctagtcaggaggctgagatggactgcttaagcccaggtattcgaggctacagtgagctgtgattgctcaccactgcactctagcctgggcggcaaagagagaccctgtctccaaaaaagaaaaaataatgttaaaaaaacgactgcaaagtcacacgaatacaaatagtgtggcatcattgcaaaaataagaaaatagactcatgaaacagaatggagaactcagagacagacacatgaataagctaaaatgtcacatctggtaaagggagtcccctaaaactcttggagaaatggatggattttctggctgtagaagaaaaaaagtggaggaatttaacttcatagaaattcatcaaaagtatcctccaaaagttaaaaggcaatagtttgtaacaaaacagagaaaacaagattaattttaatacacatttgtaaaagtaaatatttttaaagaatccaaaaaaaaccagcaaaaaataagaaaaccacttccataaaaagaaaacaaataacttatcaacatgtgcaagagatgttcaatctcacccttaattaggaaaatgttcattaaaagtagaaatataaagattgacaaagatttaaaattcaatagtacaacactacttttggtaaagttactggaaagcctgtaccatcaaatcagctaatagaaatggactttctatcataattgaagttgtacagtgcaaatggtctttgattcttcaattccacttcacagaatttgtcctgcagaggtgtctacacttgtaagcaaaggtcactgtaaacacatgccaactgcctatggaaacctttacataagtgtccaatataggaatgagttgaataaaatgtgaaatagaaaaaaaaagctgtaagacacactgttgagtgacaaaaaccagttataaaatgtatagatacgtatatgcaaaagggaaaaagtatatagatgtatatgaatattgatgacatagataattcatagatagaagatacattgtagatgatgatgattgatagaggaaacagaggagagagagagataaacagacaattctatggctctagagacccatttggagaaagggagggaattaagtggggtagaaggattgtcaaggataacccttgtcttatctgtaatatctcatttggtgcaagaagaacttgttctcatcattgtttttgtaaattaatgctctttttccatgtggtatatatacacaatgaaatatcattcagccttaaaaacacaaaaaaatatatatcatttgccacaacatagaagaacctggaggaccttatgctaagtgaagtaagacaggcacagaaagacaaacacgcatgatcttacttatctgaaataagtaaaacttgatctaaaatagtcaagctcatagaagcagagagtagaacagtggttactggaggccagggctgaggggaagggagaggaaatggtgagatgttggttaaagggtacaagtttcagttaaagaggaataagttcagatctattggacacagcatggtgactttagttaacaacgtattgtattacctaaaaatgctttaaaaaaaatttcaaatgttcttaccacaaatatgataagtaaatggggtggtgggtgagttcagcaccttgatttaattaccatagattgtatatatatatcataatatcacactctataagtatatataaataaaatttctcaattaaaagtaaaaaacaaactcatttcccaaaacttgttaattgagaaaatttttttaaatctcacatatatatacatatatatgtatatacacatatatacatgtacgtgtatatatgtatatatgtatatacatgtatatatatacacatatatatgtatatatacatatatatacacacatatatatacatatatatatgtgtgtgtatatatatatatatgttgtttttttttcttttttttttttttgagacagagtctcattctgtcacccaggctggagtgcagtggcatcatctcaactcactgaaatctccacctcccgagttcaagcaattctcacgcctcaacttcctgaagagctgggactacaggcatgtgccaacatgcctggctaattttttctatttttagtagagacacggtttcactgtgttggccaggctggtctcgaactcctggcctaaaatgatctgcccacctcagcctcccaaagcgctgagattacaagcaggagccaccatgcctggcctcagagatatattgttaatgcgcagacctgtgtgtattttatatatttatacagaaaaggggagtgtgtgtttatataaatgtgggcatcaggatagccattttctagaagaatgcacagaaaactattgaccacagtcaacgctcgggtggagcttaataaggaagttcatttttatcataaactcttttggacactttttttaaccatgtgcataattttgcttgaaatcttggtttgatactccagaatattgatctgggcaaagattttctgtgtaacatctcaaaaatacaggcaaaaaaaaagcaaaaatagacaaatgggattatatcaagctaaaaagcttctgtacagcaaaggaaacaattaacaaagtgaaggaacaagctatagaatggcagaaattatttccaaactatccatctagcaagagattaataactagaatatataaggagttcaaacaactcaatagtaaagaaaaaaaacaacaacaaatcatataatttaaaaacggacaaaagatctgagtagacatttctcaaaagatgacatacaaatggccaacaggtagatggaaaaaatgctccatgtcactaatcgtcataagacatgcaaattaaaaccacaaggagatatcatctaacccagttaaaatgtcttttgtcaaaaagacaggcaataatagatggtggtgaggatatggagaaaggggaactctcacacactgttggtgggaatataaattagtacagccactgcagagaacagcatggaggttcctcaaaaaaactaaaactagaactaccatataacccagaaatttcactactgcctatatatccaaaagaaagaaaatcaatatattgaaaaggtgcctgcactcccatgttaattgcaacaccattcacaatagccaaaatatggaatcaagctaagtgcccatcagtgaatgaatgggtaaagaaaatgtggcatatctacacaatggaatactattcagccataaaaaggctgaaattttgttctttgcagcaacatggatggaactgaaggtcattgtggtaagaaaaataagccaagcacagaaagacaaatattgcatggtgtcactcatatgcaggagatgaaaaaaatggatcttatgaaaatagaaagtagattggtagagggaaaggggggataaggagaagttgattaataggtgcaaatgtatggtttgatagatgaaataaaaactgttcaagctgggcaaggtggctcacgcctgtaatcgtagcactttgagaggcttaggtaggcagatcacctgaggtcaggagttcgagaccagcctgaccaacatagtgaaaccctgtctctactaaaaatacaaaaattagccgggcatggtggtggcacatgcctgtagtcccagctactcaggaggttgaggcatgagaatcacttgaacctgggaagcagaagttgcagtgagctgagatcgcgccaatggacgtcagtctgggcaacaagagtaaaactccgtctcaaaaaaaaacaaaaaacaaaacagtactcaatggatcagtggggtgactatagtttgatagtttgctggtcctctccagtacaccctccacagtagccctagaaagatcttcctggtaccagatctgacctttccctcccctcctcaaacgcatcccttggctccccattgcccttgggtaaaagccaaagtcattaacattttccccaaggcttccatagccagcccctgctgccatctccagtttcatcatctcattatgaccgaatctctccctctctctctccttcgccttctctctgctcctttctctcaacccaggagatcttactgagctagagccactgttccccaactgcacccaaatatctactgaccatcattcagggtctcaactgagacactttctatacccccgagtcatgcttctcttactgtaaaacccatccctgcccatatgggctgggagtgtcctgaccagggactgctcccatgtgggcgggaagcacctggaaaataggtccctgggttgtgtccttcccaaaatctccagagcacagacaggtaatgtgaaaagaactgggggtgggaatacagtgtgggaatgtttgctgaatgaggaccgggtggatgaacaatccaggtgttctggacaataaatgaatgatttttactctgaggtctccatcatgaatccctggactggacataagtatgggaattagagaacagaagagcaaccattaaggaagtgaaaatgttcgaaaaaatatttcctggagaaaaggaagggtgtggcattcatttgcagaacgtgtgctgagtggcctcatctcctctcacttattgtcactaattctctcagcagtccagtctttcctttttaattttctttcccttattccttcaaatatttatttctctccttttatattttaatctatatctaatatacttgttatctacatgttgcatctctctctctctctctctctctctctctctctctcttattttattttatttatttatttatttattttgagacggagtctcactctgtcgcccaggctggagtgcagtgacgtgatctcggctcactgcaacctccaccccctgggttcgagcgattctcccgcctcagcctcctgagtagctgggattacaggcacctgccaccacgcccggctaaattttttgtagtttcagtagagatgggatttcactatcttggccaggctggtcttgaactcccaacctcatgacccacctgcctcaggctcccaaagtgctgggattacaggcgtgagccaccgcgcccagctgcatctctatttctatttatttcaatagtttggggggtacaggtggtacatggataagttctttagtggtgatttctgaggttttagtgcactcattacccaagcagcatacactgtacctaatatgtaatcatttctccctaaccccctctcatccttgtcattgaatcccctaagtccattatatcatccttatgccggtcagtagcataaattgaacccaatatgtagttttttgtccctcaccccctcccaccttccctcttctgagtctccagtgcccattaaaccactctgtatgcctttacatacccatagcttagctcccacttataagtgagaacatatgatatgtggttttccatccctgagttgcttcacttagaataatggcctccagctccagccaagttgctgcaaagctgtatttcattctgtttgatggctgagtggtactccatggtgtacatataccacattttctatatccactcattggttgatgggcacttaggttggtttcatatttttgcaaatacaaattgcgctgctaaaaacatgtatgtacatgtgtctttttcatatatgacttctttctggggggtagatacccagtagagggattgctggatcaagtggtagttatacttttagttctttaaggaatagtagcccaggtctttctgtcctagcagcctgcaatctttcccctgttagccaggctggccctgcctgtggtcctctgcttctattcccagtaagcaaaagtggcagaattgacaaaacaacttccccacttcccacttggggagcagagccaatgagagggcctcaggaactggccagaagaacctgcactcatcattcaatctctttaggctcgtgatccttcagaagcttttgcacctcctgccagcagtgctcctggtattctgggtgccttgcaaggtagtataggacccaggagaggccactggccgtggtgttatgacctgaggggcagcaagacaggcttgagtctctgggctgcttcagtaccagagggtggacagcgtccatgcatctaggttctcaggaggatggtggggttggggggaggatgggctgaatggagtgatgcagggttcatctcccacatccctgggatggagaggcctctgtccctactgtagtcccacactgggacactcatcctcaaacatgaaggtgtcagcttctgctcttatttcctcatcagacaactccttccaatcttcatcctggtgagaaggcaagacacacacacacacacacacacacacatacagatcacactagctctgagggatcctcagtttaaagtcagacaatctctgaagacccctccttccagaatcccaagcccaccctgcatgcctagatgtctcttgatcaccatcacgagagcccccaactcacaggcttcctccctggcctccttgtctcttcttttgtccctagtgggaggactcaatgacctatgaatattttcatatttctgcatgatgagaactttctgagaaaaagttcctggcaacctgggttacaggataattggcaatttgctttgcaagttagagattaagtattgctccaaaaatatttgctcacattctagagtgccaaatccatagactcttatcttatgtcccctggagatatttgggttgtaagtctacagactatggcatctcactaaagaggatttgtttatgctccagaacaaaatactttctcctccctgcatcccccacctgtctgtctctttctctctccctctctctttctctctcactagagcaaagaaatagaagatatgccaagactcataatgtagggcacctctcctagggtgcaaactccgttgcacataaaggtaaaaacattgcattctccttggaggaatttgatttgggaatggagagccagtgccacaatcctactctggctgctagtattgctgtgagcaataaatgggctgctctgatccaggtgtttaatgcatctgtcacaatagacatatacatagaaaggcataggcatagacacagacacatagacaaagacaagggcatggatatagatatagacaaagacataggcatggatatagatactgacaaagacatcggcatagagaaatatgtagacatagaaatagacaaaggcagacatagagaataacatagacatagacataaaaaagacataggcatagagaaagacatagacagacaatgacgaatacacagatgtaaacaaagacatcaacatagacatagtcatagacagacatagacaaagagaaagacacagatatagaaacagacacaggcacacaaatacacatagacatagacaaagactcagacacagaaaaaggcaaaaagatagagatagacacagatatacacatagatatttgcatgaacaaagctataaacatagacagagatgtaaacaaaagcatagacacagaaaagacacaaagacatagacaaatacagaccaagacaaagacatagaaaaagacacaatacagaccaagacaaagacatagaaaagacacaaagacatagacatagacataaaaaagacacaggcaaagatatagacataaacacacataaagatatagacataaacacacaaaaaggcaaagatgcagacatgggcaaagacaaagacatagtcatacagacacatagtcatactcagacacagactcagacatagacaatgacatatacaggacatagacatagatatagatgtagatgtatagataaaaatgtgacacactggcttattaatttgtaaatagagtaaaatatcagacttgtcagtttcacacctagaggtcccctgctatttgtgtctcactcagtcatctctaaaaactatctctgacctgtccctcccctgctcaagcaatttccaatgctccccagtgccctctggatcacatccaagttctttgatctgacatttgacatgaagctcccttctactttttgcattcagatcccagagaaccccaccttgctcagcaggagtacatcagtgaagtccaaagtcttggacttggcctttacttcgtggaaataatcaacaccctggctagtaagggtgtggcgctgctcctggatgatagcttctgtgaagtcatgaaccaggcagcaggccctgcggaagcgccatccgctggggatgagataatacagaaagtccatgcacagatgaaggtaaggaagttgttgagaactggaataaaggtgattcttgctatgctttagcaaagagattgacagcactttgcttctgccctgccctgccaccagggaactgagctccaagatggtggcaatatattgactgggctttctgcaggataagggcagaaagggaggcaacaacttaacacacctgaagccacaggagcatctcccaccagcatccaggagctacctcctataggaagcacagtatccaaaaacagatgcccccacagttacagagtgaggatcacccatgagattcactctccaaactctcttatctccctgatttccatctctaggagcttcctccatgcccctgggcactcagaccacaacttgaacatcatgctcttattcgctctcccctgcccccattatagagttctgtcccttctccttcctgaaactatccacaaagctcagaattcctgctcttccagctggtccgaagtccatgccccaccctagtatccttgcatccaatgtcaactccatgcaacatctacattacagttattcccccacagagctcagctctgaccatgcccatcagctcaaaccccttcaagggctccctagaaacctcatgataacatttataccagtcatttagactatgacataactcctccaggcacttctggttgtcccgatgaggtaggcacttctggttgccggaccccaacctacttctttggattcatggctcaagttctcagtccctgggcaaagactcactcctgacaatggctgtcaaagctgaagacacatttctgcacactgtccaaggtcatgaggctggtgtgctcaaacatgtccagatgggcactgccccctgaggccaggagctgccacttggcctagccagagaaggggacacagctggggctggtccctagctcctttgagtccttccccaagcccaaccatcaagatggacttccccaaagccaacctctttgtcttctccccaggaacccctccccaaggaggaccaggttgtgctgggaacaacaactgttactattaagagacaaagacccaagacgggggttcaggagaacttggattcatgttccacccttgcatgcccttggtcaatgcattaacctcccttcccctgtcaaatcttcaggaacagttgagatgatgtaccttggtgccacataaacaaggttagaaatcctgctccactattccaacctcgattattagctaggtaaacttgggcaagctccctaatctcttagacccactgtttcatcatctacactgaggcagaaataatctctcattcacagagttgttaaaagtaaattagtcaatatatacttgttatcaatgagtgggaacatggcattgtttctggccaatagggggcatactcaacaaatgttggatttcctcacctgcattgttataaattgattacaagaatttattacactatccctatgttgggagaggtagtcctccatgtgccctgagtatcctttctgggtatgccaagaatgtaagacactgatattcttaactggagccatttctgagagttgtgtttgcagagaacagccttgagggatgaggtaatgactcccttttgacacttatcaggcttgctataaaagcagatctcctaagcctactgctccatccctgtaatgcaatatactatgtcagcaagcatcagtagaagcccacctgtgttgccccatgggatttgggtggcttggagaaaaaagcaaaccaacaagaaacacatgctccttgctgtgctatgagtaataaatcatgctttgtctcttacccacaaatctctgtcttctggcagaatccatgaaaccataacaagataacttatcaatttgcaatttttaaaaaaattctagagatgtcacgaagcccttgcccaaattcttcatttgccccccatatccataccctttgaaatgtgattttttcagtgacttccattaagagaccgagcattttttactacccaccactttttgattctctgttggacttttggctttctctgacaaaacacaatgtgaaattgatgaggtaataactaatgaatctaacctgcctcgtctcactccctggaaccctctctgccatgtgaaccatggggtgccttctggagggatagaatccctggaggaaagtccaggagtcccagctgaggacatctgtgtcaatttgaaaccagacaaaacccaaacgtttgagagaactgagccaagaccagcaaggctgcctacctgacccacagcttctcatgtgccatgaatatctcttgcacatccagaagaacccactgatatggtttggctgtgtccccacccaaacttgaattatagttcccataatccctatttgtcttgggagacacctggtgggaggcaatttaatcctggtggtgattaccttcatggtgttctcatggtagtgagggagttcttacaagatctgatggttttataaagggcttttcccccttttgctcagcccttcctcttgctgctgccatgtgaagaaggacgtgtttgcttccccttccaccatgattgtaagtttcctgaggcctttccagccctgcagaactgtgagtcaattgaacctctttcttttataaattacctagtcttggatatgtctttattagcagcatgagaatggactaatatagtaaattggtagagtgaggtgctgctgttaacatacccaaaaatgtggaagtgactttgaaactgggtaacaggcagaggttggaacagtttggagggctcagaagacaggaaaatgtggaaaagtttggaacttcctagagacttgttgaatggctttgaccaaaatgctgatagtgatatggacaatgaagtccaggctaaggtggtctcagatggaggtgaggaagttgttgagaactggaataaaggtgattcttgctatgctttagcaaagagattgacagcactttgcttctgccctagagatctgtgaaactttgaacttgagaaagatgatttagggtatctggcagaagaaatttctaagcatcaaagcattcaagaggaagcagagaaaaaaagtttgaaaaattttcagcctgatgatgcaatagaaaagaaaaacccattttctggggagaaattcgagcctgctgcagaaattcacagaagtaacaaggagccaaatgttaatcaccaagacaatggggaaaattactccagggcatgtcagagaccttagtggcagcccctcccatcacaggcccagagtcctaggaggaaaaaatggttacttgggccaggcccagggcccctttgctgtgtgcaacctaaggacttggtgtcctgcatcccagctgctccagccatggcaagtggccaaggtacatgacttcagcggatgcaagtcccaagctttggcagcttccacgtggcgttgagcctgtgggtgcacagaagtcaagaattgaggtttaggaacctcggcctagatttcagaggatgtacggaaatgcctgatattcaggcagaagtttgctgcaagcgtgaggccctcatggagaacctctggtagggctatatggaagggaaacgtggggtgcaagcccccacacgtagtccctattggggcactgcctagtggagctgtgagaagagggccactcaatatcccaaaatggtagatccactgacagcttgcactgtgcacctggaaaagcaactgacactcaacaccagcttgtgaaagcagctagaagggggcttgtaccctgcaaagccacaggagtggagctgcccaaggtcatgggagcccacctcttgtatcagcatgaactgaatgtgagacatggagtcgaaggagttcattttggaactttaaggtttaatgactcccctactgcattttggacttacatggggctagtagcccttttgttttggacaagttctcccatttggaatggtgtatttaccaaatgtctgtacccccattgtatctaggaagtaactaacttgtttttgattctacaggctcataggaggaaaggaattgcctcatctcagatgaaactttacactgtggacttttgagttaatgctgagatgaattaagactttgagggactgtttggaaggtgtgattggtgttgaagtgtgaggacatgagatttaggagggggcagggatagaagatgtggtttggctgtgtccccacccaaatctcatattcatttgtagctcccataattcccaagtgtcatggaagggaccaagtggaagataattgaatcatgggggtgagtatttcccatgatgttctcatgatagtgaataagcctctcaagatctgatggttttataaagggggagttcccctgcatacactctcttgcctgccaccatgtaagacatgactttgcttctcattcaccttccaccatgatagtgaggcctccccatccatgtggaactgtgagtcaattaaacctctttcctttttaaagtactcagtctcaggtatgtctttatcagcagcatgagaacagactaatataccagccacctgtctcatagacttgttagcaatcataaaaccttattgttttaaaccaatgagttctcaagttgtttcttactcagcaacagctactatacaattgtcatcatgaccctcttgagtttacaagaggaaatatagaaacagacactttctgggcacctactatgcaccagggatatgactccattacatcaccttgaccatcttttaagtagggattattatacccattttacagctgaggaaaccaaagctcagagaggaaaagcaatgctgaatgccacccagcagagccaaaattccagaccagatctgtctgtggtgcctccaccccaaggcttcagctggaactctgggttcaaagaattcacgtgcatgatattcacactgtcagtgaaaaacttcatatagggcttcagcatgttgaaatggaaggcgggcatcagcatctgacggtggcagctccacttgtcactggcatttaccaggagcccatcccctagtagaggcagtcaagggccatgggcaagggtatctccctcttcttacccatcccccaaggtttttcccacccttgttcacctacaggtactcacccagccagggcttcaggaacttgtagaaggcctcgtcttttggtgcaatggtggctgacatgaatgaggaccatcagaaaccatggaaagggtgagggagggactttgggtgtggggtgaggctccaagccagagaccacacttactccctcaaagcgcagcatagtagaaacatgtgacatggccccgatatgtgttaacatgtcctgacatggtcacaaaatacacaacaagccctagcatgctatgctgtgctctaacaaggatcttagacactctgaaatgaccttagcatgccctataggcaggccccagttaggattcagatttaaatatggtccctttaatatcccagaaatagcccatgtctggtcccaaatgttccatagtcatgactcaaatataccctgaagcctgtctcaaacaatactcaaacaatgtctcagaatgtttacacacagaccctgggttccagacatgaggcacatccctgggatcatatggagatggttatgtctagggctcagctgtggccaagagtatttggggtatgtggggtttgtctgcgattctgtttgagatagtctttttcttctgctggtgacgtctgggccatgtttgggatgcgcctcacgtttgggcaagggtagggctccaggctcgggtggcgtctcctactggagattcctagggcctggagcaggagggcaatgagcatatagtggaagaaccacaggatggggtagaaggaaccgacccacagaggtgaatgtcatgaaaatagcagtccagatcctccaccaactgcatgtcctcctcattgttctgggcttggggacatgcaaggtgatgccaggcctggcaggaggtcttgaattctaatgttgcccattgcatcgcttcatcccccactttaaaacattcctactcattgttagaaacccagctccagcaacttctcttccaggaagccttccagcctgccccaggagagaccaggttctcctctgggctctcccagcccatctccttctggaccactcctgaccccatgactttggggatgtctctgcccagatccatctcctcaagcttgggagatccttccaggacagagccttgggttgaggcctcatggggctccagtagtgcacagaacgccggggtggtggggggatggcagtagtgggaggagacgctgagatgggggttggtgaatacatgaaggaaagagaagatggctgagggtgaagcaagaaggaagggcctggatactgcagcggccacacagaagcttgggggaggaggggcttgcaggcctcagatgcaccacggcattcaccaccaggtgtttcagatggtacctgaggcattgatgacagaccagatgatgttggggtggcacaacctgatgatgggagtaatggggttcatccagatcttaaagccctgggggtaagtggccaccagctgagtcagaactctcatgccctccttcatgtggggacctgcaagcaaggcaggggcctgtaatcccagctactcgggatgctgagacacaagaatctcttgaacccaggaggcggaggttgcagtgagccgagatcacgctactgcactccagcctgggcaacacagcaagactccgtctcaaaaaaaaaaaaaaaagaaaagaaaaggaggccatcctagcaccatgcatggagtccagttctttggataagtatgccactgggcaatgttatgaccctataacttgagtcagaactcctatagccatttctttttgttcatgaacatatagaaagaaaggcttagttatgtctggtagtcctaaagctggggcccaagttaaagcttccttgatctgttcaaatgctatttcttgattagtcttcgaaaggaggggctgtttttctcctatctttgtggcttcatataatggtttagccattaatgaaaaatttggaatccaaatatggcaaaatcctgctgcctctaaaaattatcgtatttgacaccgggtggttggggttgggagtgcacaaatggcctgcttctgtttatagccaagctggtgttctctgtggcttactatgaaacttagatatttaactttttcatggcaaatttgggctttctttttagatactttgtaacttgttttccataaaagatggaggaggtcctgggttccttggtaataatcctctcgggttggggctgccaaaagaaggtcgtccacgtactgaaacaaggcacagttatcatttggcagggtataggccttgaggtttgaggccagtgcttcctcaaagattgtaagagagtttttgaacccttgtgggagcttagtccaggtgagctgtgtagcttccttgtcctattgaaatgcaaaaatgggctgactaactggtgccagtcagatacagaagaaggcatcttttaagtctaagaccgtaaaccaagtggcaacttgctggaataagtcccattaaagtatataggtttggtactactaggtggatagccactgtggccctgtttctagcccgcaagtcttgcactggtctatacacattagaccctggtcctggtgtcggctttcatgctggcaaaagtggagtattccggggagactggcatcggactaagatcctgtgtttatagagccagtctaaatgcttacaaatgcctcaaatagcctctcaggggaccgggtactgacgaactcgaaccagagttgctcctggtttcagtttaactactactggtggatgatttacagccagcctaggtgggttatcttcagcctataccttaggaattttattaactagtccaaataataatttttcttctttccgtgtatgaagctgcactggcgcctgcagtttctttctatgaagtctccattcctcagcctgtggaatggtaagggttaacactatggcttttgggtgagtcagattgaaagtcatatctttttgaagcctaaaagtaatctgtgcctgcagtttttgaagtaggtctcttcttaacaagggaactggacaagttgggaggtataggaattcatgctagacttctcgtcttcctataacacacctccttgactgactaaatggcctcttctctgagactccagcagctcctgcaatagttgtatagttcttggatagtggccctatgggtcaagttactacagagtgttcagcctcagcatctacaataaagttcatcaattggcctccaacttttaatgtgaccacaggcccctggaggcctaatgagaaggagcctggtctgtcctaatcctcacatccttcagctcctgtcagcccaatcaggtcagtatctggttcctctaaggcaccgcagcccttggccgatggcctctttgtctcacggccttggccatttctttcattgccttctggacattcatccttttagtgtcctttctttttgcatctctcatattgatccctctctagctttcaaatttggtcggctttcaaatctttgtctaacttaacctcttccatgtccacgtccacgtccgtgtcctctcacattgctaatctctttttctataaggcctgctgccaacagatctgccttttttttaagccttcaatctgcttccttgttttcctcctggtcatagttaacatacactttggtggctacttctataagctgggtggcgttcacgcctgcaaaaccttctaactgatgaagctttcatttgatgttaccatgggcctgtcctacaaatgatgtattcaccatacgctgattttcagtggcctcagggtcaaacagggtgaaaagttggtatgcctcacagagtctctcataaaactgacttgggctctcatcagctccctgaagcacttctgaaatcttccctgtattaattgctttctttccaccctcccttagcccttgcagaagtgcctcttggtacctctgcaaacgctgaagctgagttgcatcctctgggtcccagttgggatcttggtctgggagctggccctgagcatatgcctgagcgttcactgcatctgctggtgcaggggcttctagtcagtggagagctccctgtgttactcttctgtgctcctcagtgttaaacagcgtgagaagaagctgcctacagtctggccaggttggattgtgtgtcagaaagatggattgcatcagatctatgagagcttggggcttctctgtgtagggggggtatggtgtttccagtttaagagatcagtggttgaaaagggctggtagatgcaagttcattgccccccgccggacttggacttggtcattataataaatgggtcctcgcgtctccctgagaggcatttgcatagctcgagcatggccagatttgagttggtctgcttgactatcttgacttccttccctggccccccgaggctccgatccttcccttcagggtgagacttggggcatgctgtcttttgagtctggctcctggggagctggagctatcagcccctgtaaagcgaggtaggctgggacatatggaggaagaatctctgttccctctggtggcccctgcaaaactggcctctcttgctctctctgggactttccctttaactctgtgtctgccagtgaagctgctcttactttcacttttgggttggctcaggctacaagtgttttgcaataaggtgctaaacggggctggatccaggctggtcttgtctgtgctatatttaaccatgaatcaatacaaggaaattggtctggatgccctggctgtcctccgacccctgtcaccaccctaaatacacgaccaattatttccttgtctatagttccttcagtcggccatctaacaccaaaagaaggccattctaattctcagagagttctcaacctctggggggttaacttaattccataatcccctgcaaaatctttcttaaagttctgtaacatgcattccaatggagtaagttttgatgactttcctcccattcctccctttacagcgcagcacactcactcttgcacactcactcttcctcttgtttcggctgaatataccatctcctattacaggagttttcagatgctgcttggcttcggagagttccttattcctgctacaactgctgcagtcgtagggcagctcctattagccatatgcagatcaccgctagtcttagtcggccccacactttgctcagaacacacagtccaggctaagagatctgtgactccccactttgcaactgatgaacctaattaggcccctccattcacacactttcacacacttccccactcccagttcccatgttcttaattggggtggtgagccactctcactacctccagtttccttttcctaaccaacttagtgagccactcttgcatcctatgtcagttggggtgtaagtttcatctgaattggcgagccattctcaccacccccagcccttctgggttggattaatagtcacatcccaggaggtgatcaggctccccttccatccttatggggtgggtcctgccttgggccccaaaaccttactgcagtcctgaaggaagcacgctgctcctggaatcatcccatagcccctcaggttccactgtgctgctgggtaggggcaccaggtcatgagagacccgatctcccctccgggctgaagttctctgggcagtgcctggggtcacaggtctcccctggcccagggctcctccagcccccacaggcaaaggagacagtaagcctgttgtctccactcctggctggctcttcagaaatgttgtgggaaactgaggaacagagaccgatatgggagaacaggaggatatttattttaaggtatgcaccagttcagtggattcacatccaaaaagctgagcgttggacaaaaacaaaagttaacttatataggctagcatacaagagcaaaacaaagacaataaattttacagtgacaagccacataatctatagtgtaactgctaacttggcataacttgtggccttgtatatgcagcgcatcagaaaaaaattaaaacaggaactttgcaaatcttactaaatacaagcattggcaaacatagtcataactaatagttcagtacaggagagacattgaaggaatttgttgttcttttaacctttctcaggagtgtctgcagctcatttctgcaggccaggtcgccatgacctgtctatagccttgcctgcagcagaggaaaacttgtgtttttcaaataacccttatttcttctggagtgaataaatgcagtgtttatttttctttaatttctgccttaacactgcccaaagcaatttatagattcaatgctattcctattaaactaccagtgagattatttacagaactagaaaaaaaacagttttaaaattcctatagaaccaaaagtgagcttgaatagctaaggcagtcctaagcaaaaaaggtaaagctagagacatcatgttacctgacttcaaactgtactacagggctacagtagccaaaacagcatggtactggtacaaaaacagacacatagaccaatggaacagaatagagagcccagaaataaggctgcacacctacaaccatctgatctttgacaaatctgacacacaaaaaaactaacaatggaaaaaggattccctattcagtagatggtgctgggataactggctagccatacgcagaagattgaaactgaatcccttccttataccacatacaaaagttaactcaaaatggattaaagacttaaatgaaaaacccaaaactatgaaaactctggaagacaacctaggcaataccattcaggacatagacatggtcaaatatttcatgacaaagaagccaaaagcaactgcaacaaaagcaaaaattgacacatgggatctaattaaactaaaaagcttttaaacagcaaaggaaactatcaacagagtgaacagacaacctacagaatgggaaaaaattttgctaactgtgcatctgacaaaggtctaatatctagaatctataagaaacttaaacaaatgtacaacagaaaaataaacaactccattaaaaagtgggcaaaggacatgaacagacacttttcaaaagcaggcatacatgcagccaacaagcatataatagaaagctcaacatcgctgatcattagagaaatgcttatcaaaaccacaatgagataccgtctaacaccaatcagaatggctgttaaaaacgtcaaaaaaaaaaaaaaacatgctgatgaggttgcagagaaaaaggtacactgatacgttgttgttgggagtgtaaattagctcaatcagtgtggaaagcagtgtggttatccctcaaggagctaaaaacagaaccaccatttgacccagcaatcccattactgggtatatacccaaaggaatagaaattgttctatttttaaaagacacatgcacacctctgttcactgcaacactattcacaatagcaaagatatggaatcaacctaaatgcccgtcaatgatacactggataaagaaactgtagtacatatacaccatggaatactatgcagccataaaaaagaacgagattatgtcctttacaggtgtgagccaccgtgcccagcctaaccaaaggctcttttctgagccatcattttccctggcaggcagtggaactgagcagatgggccagtggccatagtgctgctgccttgtgtgggacccaccaattggactggcagaccagtgggttactggtccccatgcaggcccctcgcaccatgacagccgagcccacccaagctgagggatgctggagagatatccattcaccctggccaggcacattggctcacgcctgtaatcccagcactttggaaggccaaggcaggtggatcaccagaggtcaggagtttgagaccagcctggccaacatggtgaaaccccgtctctactgaaaatagaaaaatttgctggttgtggtggtgggtgcctataatcccagctactcaagaggctgaggcagtagaattgcttgaacccgggaggcggaggttgcagtgagccgagattgcaccactgcactccagcctgggcaacaagagcgaaactccatcttgaaaaaaaaaaaaaaaagatattcattcacccacccaggcagagcagtcaataccatttctcctctggtggatgagggatgtcccttctgccctcacccccgcagtcttgggagaactataggataacataagagcctttggccaggtgatcccccagtagtagctcgttatatgagtgccccaaagcacgtccttgtcaccccttcctgcagtcctttcccttctgactccattttatgtctccgccagtcattttattttcagccctaaaatatgtgcagtgttacatttgcttttaactttctgttaactctccatgggcaattgactactgtgggacacttggttgtgagcggtcttccgttgtgttgactctgggacatcagaaccagagttgttctgtgtccccaacttgggttcacttttggccacccctggggtgccccagggtttttggcattggtgaggggaccctcgttgactgaaacttgggcacttctgagtcttcagctttgttatgttggccaccccctggatgctctggggttttcaacattgacattccctgtaggattatggattatagccctccctctaagggaacattggtcatgtctttttctgccctaaagttagtaccatcttcctggccaagcacagtgactctctcctgtaatcccagcactttgcgaggccaagatgggtagattgcttgaggtcaggcgttcaagaccagcctggccaacatagtgaaaccccatctctactaaaaatacaaaatttagccaggcgtggtggcaggcgcctgtaatcccagctatttgggaggctaaggcacgaggatcgcttaaacccgggaggcagaggttgcaatgagtcaagattgtgccactgcactccagcctgggggacagagcgagactctgcctcaaaaaaaaaaaaaaaaaaaaaaaaagaagcactattttcctaatagccagttgctagccctttcctgtgtactgtcttaccaattgccttgctcgagcccctcttggtcaaaggaattgggagttcccaggcccctggcctgacagacagccacctacagcaatagacaagtggccacattaattttttttttttttttggcgtcttcactactacgtaagttctctggcaagtcaaggaccgtaaggtctccctttgtgcaatgtttacccttcccttcctcgcttacacagtcactatttggttggcccccctctctgggtaatgctcattttctgtggaatttaggcttaacatccaactgcccatttgaagctcataatccacttttgtaacattttgctatctatataaagtgggaaattaaatgggataagtgggctgggtatggtggctcacacctgtaatcccaacacttggggaggccaaggcaggtggatcacttgagcccaggagttcgagaccagcctgggcaacatagtgagaccctgtctctacaaaaagtacaaaaatgagccaggtacgatggcgcacgccggtagtcccagctacttgggaggctgaggcaggagaattgcttgagcctgggaggcagaggttgcagtaagctaagatcaagccactgcactccagcctgggggacagagtaagaccctgtctcaaaaaaaaaaaaaaaggaaaagaagtaaaagggaaaagtgaaaaggcatttgctaaacttaggctaactgaaaccccttgtagtgatctttactaaacataaggacatcaccaagcatcccaaggaacttgccactaggatgtctttcaggcaattggaataagttcaaattattgggcaagttgaaaaagaaaaaaatcatttactattgcaatatgtttgggttcaattcaagttggcaaaccaacagatttggcctaggcatggttctttacattataatggttgtataattagatttgttgtttcgcttttttgtttttgagatggagtctagctctgtcgcccaggctggagtgcaggagcgcgatctcagctcactgcagcctctgcctcccgggttcaagtgattctcctgcctcagtctcccaagtagctgggattacaggcgtgcagcaccacacccagctaatttttgtatttttattagagatgggatttcaccacgttggccaggctggtctccaactcctgacctcaagtgatccgcctgctttggtctcccaaagtgctgggattacaggcatgagccaccatgccgggctaaattcccctttatatatacatctatcctattagttctgtccctctagagaaccctgataatacaccaggccataccatttatcatgtgggaggggatgtggttccagatctagaccccagtaggattatcagagaaaatctcaagatctcaaacacagaaaccatatgctaatttgtttaatacatggtaggaaaaagtgtgcagttaagccagttttttatgataagatgggagaaataactcaggagaaagttgaaaatcccgttctatttcagggctgtttcattgaggcactcaggaaatatactataagatctacttctgtttggatctcttatgtctatatgttaatatgtgtcatgtggaaatacgatttcactatcaatcatataaaagagctctcattagttggtttaaagaaaggttggttcaagccgggtgcggtggctcatgcctgtaatcccagcacttgggaggccaagcgggtggatcacgaggtcaagaaatcgagagcatcctggccaacatggtgaaaccctgtctctactaaaaatacaaaaattagctgggcatggtggtgcgtgcctgtcatcccagctactcgggaggctgaggcaggagagtcacttgaccccgggaggcagaggttgcagtgagccgagatcgcaccactgcactccagcctgggtgacagagtgagactccatctcaaaaaaaaaaaaaaaggtggttctttaagcaaggctgggttaagaataaataaataataaaaattttaaagtaaacaagaaaaaaaaagttggctgtacatggtggctcacgcctgtaatcccagcactttgagaggctgaggcagaaggatggcttgagcccaggagtttgagacgagcctgggcaacatggcaagactctgtctctacaaaaaaaaaaaaaaagaagaaaagctggctgagcatggtggctcatacttgtaatctcagcattttgggagaccaaagtgggaagatggcttgaactcagatggtcaaggctgcagtaagccatgatcacaccattgcactccagcttaggtgacagagtgagaccttgtctcaaaaaaaaaaaaaaatagaaaagtaaatgtttatcagactagtaaaagctagctcagaggctttccagttcacacgactttagtaatctttggtaagattaacttggtaaatttagtctcaaaattattttgaggaatttaaaatctttaaatcatgttatgttaagtaatcctagggttttcgctgggaattagggttctaagagttagaatagtaggagagtaagatgtgtttttggtgacgtttataaaaaacatgacgatgtcttttttgcttaagaaaatacaattttttctaatttaaaggacctttctactggcattgagattaaaaccactgtatctaaccatttgcgtgtgtgtgtgaagtggtaagtttctatttgatattaatggctagagttctaaagtaaaagctatatgatcttttttttttttttgcgtctcactccagcccaggctggagtgcaatggcgcgatctcggctcactgcaacctctgcctcccaggttcaagcgattctcttgcctcagcctcctgggtaggtgggattacaggcgcccaccaccaagcccagctaattttttttttttgtatttttagtagagatggggtttcaccatgttggccaggctcgtcgcaaactcctgacctcaagtgatctgcctccctcagcctcccagactgttgggattacaggcatgagccgctgcgtccagtctataatatctttatttgtgtacgtgtgtgtgtgcacacacacgcactcatgtttagatgtgtttatgtgtatttacacgtgttttgctattgtggccacaagataccaatttggctttaaaataaaagaatacctataaattaagtaaataaacccaaatacttttccagttcatgtgacttaagtaaatctttaataaataagctggatttaaaattactggtaaaataaaattagaaatgtcttcagaattgtcaacataagttattgtttagatgtattggtcaagcagttttatatttatctctgctaaatatcataagatgtcaagatttggcgtgagggttatcaagctataaatgcagcccagaagagaattatcttggccgagtgcaggggctcacgccgctaatcccaacactttgggaggccaaggcaggcagatcatctgaggtcaggagttcaagaccagtctggctaacatggcaaaacccacctctactaaaaatataaaaaaaaattagctgggcatggtagtgggcacctgtaatcccagctactctggaggctgaagccggagaatcacttgaacctgggagacggaggtttcagtgagccaagatcacacccctgcactccaatctgggcgacacagcgagacccgtctcaaaaataaaaaaataaataaaatgcactaacacaccaacctgggcaaagtggcaaaatcctgtctctacaaaaaatacaaaacttagccaagcttggtggtgcacacctgtagtcccagctactcaggagactgaggtaggaggatcacttgagcccaggagttagaagctgcagtgagctgagttggcaccactgcactctagactggggaacagagactgtttctcaaaaaaaaaaaaaaaaaaaccctaaagaattggttagaacgagtaaattttcttacagtattgatttactcttaataaaattataaaaagttttaatttttaacccaaaagttcaacttttattgcatctcttgctgtattcagctttctctccccttcaagaagttctgagatagtaactgtctctttcaacttttcatcggcctctgtaactgtttttcatcacattctaactgatgtggcctgatgtcagaaatgttttgtcttaaagtctaaaggaaatgttttcatctaatataacattcttgtgctcttggctttaaattcgtctatgaaattaaaaactcacttatgactcgggacacactctgtgtctaaatcagtacaattttcattagatttgacttgcagcttatctaaatggactccccatggagaaaagcaatcacactgcagacggtcttttttttttttttttttttttttttttgagatggagtcttgctctgtcgcccaggctggagtgcagtggcgtgatctcagctcactgcaagccctgcctcccgggttcacgccattatcctgtctcagcctctcgagtagctgggactacaggcgcccgccatctcaccccgctaatttttttgtatttttagtagagacggggtttcaccgtgttagtcaggatggtctcgatctcctgacctcgtgatccacctacctcggcctcccaaagtgctgggattacaggcatgagccactgcgcccggccaaaaggtctttttttttttttttttgccttttggtaactgatgtaacaagcaaatgtttcatcttatcaaaataattcctatgttattgttattattgattttcctaagaaaactgagattgtaaaaaattaagattatgacattaatgtaactttcggcattacttttaaagtccttgtgctcttaagttacaggactttgactcctgggtctaaaaaggacaccaagacctgcaaaattttaaacactgacagcagttaaagcctcatttttggaccctagagaagattacaatcaaaataaactgtgttcgtgagacacaaggccagaaattaaaactattattattgaacccctctagacccagggactatcatggaaaaggtgagcatgcaagattgtaagggccaattttgagagatgaaattagttcagagtttctctataacttaaacattaatgttaaaggcacactgaagcaagaccagcatctggcttatataaattatatcttatggtcaagatgattgaagcttgtttataagattgagaaactggccccataccttgtcccttattagggcttattatttaggaaagtaagtctcctctctcaaaaaataataatttaaggtctttgcatttttttgaagtgtctgagttactactttggctaaatgaatgactttagacaatcacctatgatcctattttgtgatattaagtgtcatagactttcgatatttgactaactttccaaaatcaacttctaaattcagtctttgtgacctcattattttttatattagatctcctgaagtccatgagagacatatttgactaatttagtacaataaaatcatactacatgaagtagcgctgtcagtttgggagtgaatgaagggggacggatgcagaaataaagacaaagacaaaaagatctgttttgaaagaaggatcagggggctcctcgcttctagtgagcaaaggccctgagcttctacagcccttcgtatttaatagatggaaagagcaggaagggagaggtaatggttggtcagctgcttgatttatcacagggacacgtatatctataacagccacaggtgcttctgtgacccacattttccctggcgggtcctcacactggctcaataaacttggatgatttgagactttgccttggtcattcacttttgtggtccatgggggcctggtcatcaaaagcccagtcaatgggacatagtcattgcgggccttgtctgtggtgacctggtcagccagagtcttgtcagtgagggggaagcccggtcagcaggatctaagtcagtggggttttgctcggtgaggaattggtcactggggtctgctcagtatgggccttatctgtaaaaatctagtcagtgggccaggcacggtggctcatgcctgtaattccaacactttgggaggccaaggtggatagatcacctgaggtcaggagtttgacaccagtctggccaacatggtgaaaccccacctctactaagaatgcaaaaattagccagttatggtggaatatgcctgtaattccagcactttgggaggccgaggtgggtagatcacctgaggtcaggagtttgacaccagtctggccaacatggtgaaaccccacctctactaagaatacaaaaaatagccaggcgtggtggcatgtgcctgtcgtcccagctactcgggaggctgaggcaggagaatcacttgaacctaatcaggaagtggaggttgcagtgagccaagatcacaccactgtactccaacatgggtgacagaggcagcctccatctcaaaaacaaacaacaaaaaacctagtcagtgggggtgtagggagtggtattttgttcagtaggggcctggtcactgggggtctggtcagcgggatctgaaaagtagagcctcgttagtaggggttgggcggttagcacctggtcagtggaaacctcgtcattgtggtctagtcagctgaggcctggcggtgtggtcctgctcagtcagcgaaggtctcaccattggaagcatgtcagtgtggcctagtcagcagatcccggtccatgggatttggttatttgggacctggtcaatggggacgtgttctgtggggaccatgtcagcagagacctggttgtcaggggtgtggtcagctaatgcggtgccaccgaaggactccccagtggggcctactcagtggggccctggtcagtggaggcctggttgtaaggggcactgttggcagtgaccttgtcattgagctcctggccagttgggaccagtcagtggtttgggtcagtggggcctggtctgtggggccatgtcatgtggtctggtcagtggggccctggcagtgtgggcctggtcatcagaagcctagtcagtgggggggcctactcacgggggtgttggtcagtgaggacatggtcattgtggtcggcttaacgggatccattcaatgagggtcaggtcatggaaaatctggtcagtggggtttgatcagcaggggactgctcagtggggatcggaccagtggggcctggtcagcaggcggccggcagttcctggggcctggtcagtggggtccagcagttgggacctggttgattggagggtccagccctacgggacttagcgggtgttctccccgtgtgcagagacgagagagcgtaagaaataaagacacaagaccaagagataaagagaaaacagctgggcccgagggaccactaccatcaagacgcggagaccagtagtggccctgaatggctgggcacactgatatttattgcatacaagacaaggggcgtagggtcaggagggtgaatcttctaagtgattgacaaggtgaagcaagtcacgtgatcacagcacagggggcccttccctcttaggtagccgaagcagagagagagaaggcagcatacgtcagcgttttcttctatgcacttacaagaaagatcaaagactgtaagactttcactattccttctaccgctatctactacaaatttcaaagaggaaccaggagtacgggaggaacatgaaagtgaccattggagcacagcaccacaaggaggggtttaggcctccggatgactgcggcaggcctagataatatccagccttccacaagaagctggtggagcagtgttccctgactcctccaaggaaaggagactccctttcgcagtctgctaagtaacgggcgccttcccagacactggcgttaccgcttgaccaaggagccctcaagctgcccttatgcacgcgttgacagagggctcacctcttgccttctaggtcacttctaacaatgtcccttcagcacctgaccctctacccgccagttattcctaggttatgttagtaacgcaacaaagagtaatattaaaagctaatgattaataatgtttataataatgattgataattgtccatgatcatctctatatctaatttgtattatgactattcttattctaactattttctttattatactgaaacagtttgtgtcttcagtctctcacctcggcacctgggtaatcctccgcccacagtcaataggggtctgcagctggggcaaggtcagcggggatctgatcagtgagacctagtcaggtctcactgactgactaggccctgggggttggggcctggccagcaagagtccagtagttggggcgtgtttggcgagggtctcatggttggggtctggccagcgggggtcccacagttggggcctggtgagcagagatctggcagttgcagcctcgtccatgggggtctggcagttggggcctggtcagcggggtcttatagttggggcctgtttggagggggtccagcagttggggcctggtcagaggggatacggcagctgggggttatttggcagggatgcagcagctgggacctggtaggtggggtctggcggttggggcctggtcagtgaggatcagatcagtgcggtctaggcagtgaggtctggacgctgggccttcatctgcatgggtctcgcagttgggacctggtcagcaggggtctaccagttggggcctggttggcggaatcaggcagttgggacctggttgtcgggggtccaacagttggggcctggtcaaaggggatccagcagttggaacctggtcagcagggctctggcagttggggcctggtcattggggtctggcagttggggcctggtcaacaggggtccaggagctgaggcctggttggtgggccgtctagcagttgaggcctggtcatctgggcccggcatttggggcctgatcggcggggatcagagcagtgaggcctagtcagtgaggtgtggatgtgggggcctggtaagcaggggcccagcagttggggtctggtcagcaggggtctcataagaagaggcctggttggcaagggtctggcagttggggctcagtcaggaggggtctaggagttggggcccagtcagtggggtctggcagtttgggcttgatcagtgcagtccagcagttgttggggcctggtcagtgggggtccagtagctgggacatggtcagtggagtccagcgtccggggcctggttggcaggggtctgacagttggcgcctggttggtggggatcccatagttggggcctgtcagcagggatccagcatttggggcccagtcagtggggttcagcttttggggcctggtgagtggggttcagcatttggggcctggccagcaggggtccagcagttgttagggcctggtcagcgggggtctgattagtgagatctatttggtggggtccatcagttgggacctagtcagtgagggccgtgagggccttgtcagttgcagccttgttattgtggcctttgtcagtggtgtctgatgagccagggcctggtctgtggggcccagtcagcaggacctggtcagtccacatctggtcagtgggacctggtcattgtgggggtggtcagctaggacctgttcagtgggagcttaaccattggaagcctggccagtgggatcctgggtgatctcaggccacgggttagtcctcgaagcctccgtgattgcctccatccatggggtggggggtgagtcacagcaccccagtgggcttctgggaggaggaggtgagagggtgcattgcattgaatccagccctgccacacagacctggcactttacacactacgcgagtcaccccaagggggaagcctggcttctgccctctgccctctgccctctgccctttgccctatgtccctgccccatctgcatccccaggaccacccagcatggaaagagcagaggctgaggagcacctatgggtgctctgatgctggccacaggcccgggggtgacagtgacagggatccaggtgcacacctgagtggagcagccaggcccagctggaggagagacgtgttcacccacacacatgcatcctcacatacacagacaaattgcacgcatacatgttgaccattaagcgggcagaggacgctgaccctgggccctgctgagccaggtagggccccgtcatgacagaggctgtgaacccatgctgtcactgtgccaagtgccgccagcctacctccgtgtcatggagcagttggagacacagaggtgctgtaagtggttgtgcagaaaggacccttttctgggtgagaagcacatctcagcaccgctgcctgatcagactcaggaaagcgtgacctgctctcttcccccctgctgacttggggacagtcacaaccaggtgggtggcagctacccgaggagggtcatccatgagcactcaccgggtgcccgttctatgctgaccatgcaaacagtcgtctccttcatcctcacggcgactccatggcggggtggaggggtgctttcctcaaatgtacccactgaataggtgagacgcctgaggtcagaggggcagtaactggcccagagacccagacgtggccctgggccatgctctcagccctggcctgtgccatgctgaactcaagccttgacctctgtgacctccgtgttctggattgcacatctgcctggggtttctgaccccagtggagctgagcctcgccctagaagagcccccaggatggagcccctgtgggtggggtggagggtggtcctccgtccaagtctgtgctctaagatgggtccccacagggggagatctcatcaacccagacttcgggtgcagtcagtgggggttgctgtggaacccactggacatactgggtccctcgtctgggagtggggtggggagccctctatccttgggcagttgtggaaaatgacggaggtccagagggctggccagaaggtaatgatcattcctccttttcgccaggtctggggcttttccccacgtggccctttctctgcctggtcccctagaggcctcgccctttctttgccctgactgttcatgggaggggtccctctggggttctccagaaccaagtccccagagttctctcattctttcttggtgatccggaaacacgaggccccttcctgtattgacagctcagaactgtgggatccaccatcccgccacctgagacatctccgtgagcacagaggctgctttggcccaaaccaagcaccctcccatttggctggtattattcttgacgcggcttctctggccagaaggagtggagatgggggtgaaatggaggagtcacaaggtgtcttgttccctgtaggaaagtgggcctcttggtggtccctgagcgatctgggaggctgagcatatggagctctctggtccctgaccccagtctgcctccaggtgcccaggatagcgcatcaggagcccctcacccttggcaggtggacgcagttcatcctgtgtgtgcctgtctctgggcgtctggggacaacaggcctctgtgtccaggtccccctgtcaggtgcagagactccagagaccccagcaggcatggggccactgggtcttcacccagggctgtggtggcatggggctcacccggccggcggtgtctcagagcccccgggagcggttcagatgttctctgaagcgctcaggtgcagcgttgcctttgggcgatgttgtctcacaggatggacgtggaggaagacgtggctaccctacttgcacaggagcagggggcatcattgcccagtgtgagcaggtacaggtcgggctgctccctcgagagaggtggggcctcgcctctcccactgtgccctggtgggaggatcctgggctcccttaggaagcagggtgggagctggttgcccatgcctttgtgcccccacagcccttcacctcagccccctcactctggacccctctgggtcccagggacgctgtagggcccaaggatgtggacagcttacaaagttaccgatcgcctcgagattctgcagtgagtcctctgtccctgctgcccgaccatcaccaaactcacctcagaggatgagttttgtttttagaaaagcctctctgaggcaggacacgtcttcccagcttgggccagcctcctttccagggtaggaatgccagctggctaccctgcaggtggtctgcagcaggccagagctgcgaggctcatctagggatcttgggggagcaggtggggatggagaggctctcagcagagcagtctcaaaggcagcatgagagtagggaacagcctgagggtctggccctgtcaccctgggccctgccccagtgagacccgcaggctgtggccacagggcaagggggtgcctggcccagcctgtgggcagttgtccagcaggtctctgaggattcagggggcccagctgagccaccctacagggaggggcgtggggggcagtgagggccatacccctgggagggcggaggggaagacgggcagggtgtcagccagggcatgtcagggtgagggcagggatgcagcagaacttgcagctgaaggcaacctgccttggtgctgagagggagcctgggtcctgggaaggggagcccagcctggagcctgcccctcaggagtcacaggacagagagagggaggagcctgggggaggttggttggggacgatcccacgggaggtgccacttctgggacgcacctgaatggagccagcctagggtggagctgatggcctggggtgaacaacacatgaggtggggctttagcagaggggcctcagtcagtccccagggctctgcatggccctccggagaccctggctccccgctggatccgtcagcacaaaggcagagggaggagcaggaaggccgagtaggggcaggcaagacagtgggggaacaaccaggggcccagtgcatggctgccacagtggctcagaggagggcaaggactgatggatggacgacagccccgagagccagctgagtttggagacggggctgtgtggccatcccggctgcccgcggggctcttgctcaccctcgtcacctctggcatctccccggcagcacttagcagcccagtgagagagcggtcaaggcaggcgtgtggatggatccagggccctctctcaagggttctgacagatgagggtcgaagaagggccaggctgtccagtctctgggccagagaggatgggcaaagtcaaggaacaggcagggtcagcagccggggtgcagggagaggcaggtgtatgctggaaggtcaggccccacgagggcccttgggggcatcaagtgggacagggccccggcgcaccctcagtgccctgggcaggcctcgggccagtgatgtggtcactccctcgggaaatgctgttgggaccggaccacccaccctgggccacacccatcccgcctcaggcctggattttctgagctcccgcagagtgtgctgcctagcccaggaggggcacccccattgtgcaatccaagcctcgccctccacaagccccaggcagcccctgttgggtgggccctagttccctcttctcccaggccccagcccctcccaggcgccagctggcagggaagcaccggtcctcccttccctgtgtgtcccctggatggagacctggggcgggggtgggggacagggctggttctttcctggggcccactaggggaggaggaggacagttcctggcccagcacaggtcctcagctctgcctgggttgccttacagtgagacgtagctgccacccatcagtgccctggaagtgaaggtaagagcctgaccctgctgtgtgagtggttggtccagggacagggggacccagtgggtggtcagcaggctgtgggcctgggtggtgatgagtgggagcgacaggctgtccctgggcctgcgggacctgacctcaagactctgtccccatggtggcttgatcaaatcctaaaccgagaaccacagtcgtggctcagcagtcactgcccacttgtgccaagaccccacctgaatgttgggactccaccaacgcccggggtgcctgtggcctgaggatggcatgtcccaagtcatgaggccaggacacctgtgctcattcagtcagagggtctccattccctggggccggccctttcctggctccttccagtttgatcctgtcagggccctggagcccaggacccagcatccaaggggcatcctggcagctccactaacttcatcttatttgacagagaagacatcaggagatgagggacacagaaaaatggctccaggtgcttctcgactgccagcgacataggagcggcaaggaggtgacatggggagggaagggccccgtgaccactttctacagagtcagggtgacgggctcccacggctgtgtcctggcacccccagcctctcagagggtggacactacactgggacaccagctttcctgttcttccctgcaaacctcatcttgccaggagagagtctgatgccagggccagggccagccctagctcaggggtagggacaccccctggtgacccgaaggaaggagtaggtcaagatcagagttcatgaccgggcgcggtggctcacgcctgaaatcccagcactttgggaggccaagacgcgtggatcacctgaggtcaggagtttgagaccagcctggccaacatggtgaaaccccgtctctactaaaaatacaaaaatgaaccgggcgtggtggcacgcagctgtaatcccagctactcaggaggctgaggcaggagaatcgcttgaacccaggaggcggaggttgcagtgagccgagatcatgctactgcactccagcctgggtgacagaccaagactctgtctcaaaaaaaaaaaaaaaaaaaaaaaatttcagcatttgcgacccaccaagacgcagtagttaggactcaagctcactactggcttgggcatccaagcaggaggagaagggtctcaaaggtgtcaaagtaagatggaaagaggtcaaggcccagacccctggtctaacctgagcttgaccaccatttcacagagcaagtaatgacgccctcctcccagacttgccccaaagccccccagagcttggtggtgtcccaggacggtcctcccaggaaacattttgaataagttgctgaagtgcctgatggacgtggctctcgtcacgaaatgagtttggatccgagaagccctcttcttcatcggaaaacaggcaggggtccaatttcccctccacctgaaccctgtcagagcccttccagctgacggctccacatgttgggagggcctctcatttcaagatgggtcaggggcttctcaggattctttagcccaaactgtgccagcccacgaggagcacgtgttatgaacgtcattcccaaagatcctgcggcacttggtgaacagacggtccccttggctccttcccagaggccctgggtcccatgggccaggggtaaaggggcggctggagcccctggtggggctggcaagaggctgagtcccagccagggacatggagttctccatggcttcggagctggagtttccttttcccgccctggagcaggcagaggcactcaacccgggccgagcttgggctgagcagggctaagggaagtatgtcccgggggtccatgcagggggcaggtgtcaggggtgccccagccaccacctggtgttctgtccctcagggaagggtctgcagaggggcctggaatggggaggtttgggggcaggcctgggagccccaaggacctctgctgctcccattaggacaaagatgagctgcgtgcccataattccacgtttacgctgactcctccagtgcctcatcaatgaagtaagcaggtacagtcatacatcagtgaagtaagcagggagcccccagcccagggaccctcctgccccacagtccctgcatcccctcctgcccacactccctgcatcccccagccctccagcccagggaccctcctgccccatactccccagatcccccggatcccccagccctgagatctggctcccgaggaggacctggctcacccccacctggcaggaggcacaggcgtgtccctgcagggcacataagccaggcaatgccccagaggggacatcccacagcagaggccggggctcagcccagcctcatgggcagacagggccaggactcaacctgggagagcccagggaagccccaagcccttggggagcctctccttccaggagccacatccccactgaaatgagtctcctccatgaggaactacaggacctcttctgatccagcctcacaggggagtggggtgggggatctcatcccatggggaggggtccctggtgctccagggcactgaaaccccaatgggccctgctcaagccaccagcccccagctaagaagggtcaggtcctcccactcctgttgttccgaaagactctctttgggcttgccaggcagctacgttctggatggctagcatgtaccgaaggcacaaaacctccagagttggcagagttaagtcctggcgtgcccgaggctatccaggggaacacgcgggacagacagcaccctcagcctgtccccatgaccctctgctccagtctgaggggcaggacaccatgagacctctcagacacagagtccaccctcgacatgacccggatgaaaggcaggagtgtggtgagccccttcctgcccaggcctccccctggccgtggcctcctgtgcacagctggaccccaggggtggcccgaaaaggacccagcactgcccagtgggagggggccatggtggaaacagggtgtggacaccaacctctcccagggacccctcccagcctgatgcccatcctgctcctagagcatctcatgaagctgtcccagtccagcctgggggagctcatccaggaccagttcttccgggcctgggccctggaggatgccatggcgctcaggcaccttcatgtctccatggggttactgatgaggaggcgctgagtcctgctacccccaggtgggccccagtaccaggtcccctcccaagtcaccctctggggcagtcggccagggcccctacagcctcactacctgggccttcctcctgcaccttttttccccctctaagaagcttctggaggccgggcgtggtggttcacgcctgtaatcccaacactttgggaggccaaggtaggtggatcacttgaggtcaggagttcgagaccagcctggccaacatggtgaaaccctgtctctactaaaaatacaaaacaattagccgggcgtggtggtgggcgcctgttatcccagctacttgggaggctgaggcaggagaatcacttgaacccaggaggtggaggttgcagtgagccgagatcacaccattgcaccccagcctgggcaacaagagtgaaactccatctcaaaaaacaaaaaacaaacaaaaaagaagcttctggaaataagcccgtgggtcctcagggcaggtgctgagcacatgtgtgctggacatgctgcagatcaggcaggggaaccaggggaaagactcttccaagccccaccactgccaccttccacagtgccctgcttttgccctcgaagctcgctgaaggggacccatctctgcaagcccacagccctacctgcagcatccacagcctcagagagcagcggggccccttacccctgaaccccctccaagagcatcaggacaacaagccttgagctgtggagacaagagaatcagtatccctggcccagggaggattccaggagaggacacgggcaggagccctggcccagagccagaaccaagagtccagccaggtatggaaatggtccagtcctggcatggagtggatggcctggggccatccatctcacccactgtggagacaggcccccgagtgaggtggcaagggggccaggtgacagcaaaggcctctcccatctgaattctgaatcaggggccgcatcccagccggcacagccctggggtgagagagagaggcaggaagccttgagccagcccaaaccctcggggctgtcttaggagcaacctgaggtgccccaacagctcccccgcccaagcgcacacaaaactgtcactccaggatcagctacctgcaggagagtccgcagcatcggactcagggagccacacagggaccgcagggactccaaagacccgggtctggggggcccggccctgtgaggacctaatgggctcagttggagaagcggacgccacacatctgctttcctttcagcgaaactggaactagggtccccggcacccaggactctgcgagcatcccccaacagcaagcccttctgcaagggagacgggttggcccaccccaggctgtccagctccagcagccttgcaggcagcctctccagaaaaagagcctggtcctccccaccctgctccccacaggctgtccctgaccctgaggcccagaggcacaagaggacttctgtagagcccaggggagcaggctgttctcttggggccccagcgggctcaaggtgtggccaggctgtccccaactcaggatagatcataggctgtcctgcgtacctcctctggaactccctgcccaagctctgccatggacctggacgtcaggggcctgtggtttaactttgaatagggattctggaccttacacgtgtgccctggacagccccagaaccatggggtggggaccgacccagcaagcccaccggggccctgaaacccggccctgccggacactgtgataataaccaagaggcaagtccagagacatccactttgcccaatggcacctgcatccaacttctcagcaggcagtgactggcatggtgtgggggcagccggggcagcacctggccagcacctggccagctgccctgtagcccccgatggctccagtgcctctggacctcattttctactttctacggggaaacctactccctcagaggccaccagagggaagagtgagcaaggcgttcctgcagtcccgaccagccagcggcatgtcctgtggcctctgactcaacctatgagacagagctctgatcccagggcacacttcccaggacacggggcccagcctcaaccagagccctgtgaagggaggggcaccaggatgaccacatgggggaccatggcgctgcacacctgggcactgtacttctcattggagaatccaggcaagatcttgaagcaggtgcatgaggtcctgagcctgtgcagcaaacagcactcatctggggttggcacgaaggggtctacagagccacggccaccgcagcctcttcccggccccatctgtgcagtgcaagtgatccacgcctgctcctaaacccagcccagcaagcagcagcagcccgggcccccaagcccgccaggccaatgtgctgcccagaggcttcgaggccctgcccgctgtacctcccaccacctggaagctgcctcctgacgccttccagccactgctgcagccgcaacaggtgtcgcggccagtgcaggctttccagacggtggcagcgcccagcagccgttgcctcagctctttggtggcagccaggccaacaagggcagcaacgatgactaggatgatgagtgagcaaacagctccacactggtggacaggctgggtgcgcacccggtggtcctcaaaggctcgctgggcctgtaccaccgttataaatttgagatcatgagattataccgtttgccttcttgctttttgaagtacgagtatttttatgcacactttgtagacttcaaaatccatgaagagtctcaaagaagccggatggatggagcctgctgcggatgccttttactctcgtagatcagggtgatttacattccacctgtagtctgcttgcaaacacacagagcagccttgcagctttgtgcctttagactcttggttttgcatttctccctgctcccttcttccttccagtaagctgcaacttttctgattgaaagggtgcaaggctaacacacggaatgactaactcaggatcacatactggcagtgggagaggcaggaggagcagctgccatcaattgccagggccaagtggatgataggatggatgctggtgcatgcggaggaggcagacgcaacgctcatctctaataatgatgtctgttccctcagaggcggctagagcatcacctcttcacgcaagtgtcttgaaactcagcttgaagatttcagcaaatgtgtcttacagagaagagaagagggagtcagcccatcgggattaaaaatatagaggcagtgacaacacacactcggcttcagttcttaggagagttttggttttgattttttttttttttttggagaagattttttttttaatggatctacactgttaactgagactctgttgagattcactggtttacttaaaaacttctcagggatgtctgtaaatttcagtgttatatgtcatgaaaactggtgtgggcagatctgttggttgaaataatttctactgtttcaaatactgaaggcaggaataattggtttatactgtgttttaaatagaagtattactggtaagtcccccaggacattaaaccttaaaaatcagttttaagctattattattgtaagagaaatacaaatggctggaaaatgccacagagattcaaaagctgcttaattgaaagagcaggaagggattctggcttgcaatgccaaagtttcaatgtttttgtagttactgagctaaatcatatggtaattgacagtttctaaatctgtcacctaaaggttaaattatctactgttgccgtgaagtcaaacttactgctgcctcagaaatccctgggtaccgcgatggtcatacagaagtaaggaagtcaatttgaaatgtcagtgagtcaaaatgattaaagaggccaggtgcagtggctcacgcttgtaatcccagcactttgggaggctgaggcagtggattgcttgagtccaggagtttgagatcaacctgtgcgacatggcaaaaccctgtctctacaaaaaatacaaaacaaatttatccagacctagtggtgcgcgcctgtatagttccagctagggggctgaggtcgggggatggcctgagcctgggaagtcagggctgcagtgagccgagatggcaccactgcactctggcctgggtgacacagccagaccctgccttaaaaaaaaaaaaaaaaaaaaaaaagatttaaaaaacggtctgtttatttaaaaagaaaagtgaaataatgcccaacagtacatttactctcttttcaggctgggtgcgctggctcacgcctgtaatcccagcactttgggaggccaaggcaggcagatcacctgaggtcaggagttcgagaccagcctggtcaacatggcaaaaccccgtctctactaaaaatataaaaattagccaggcatggtggtgcaagcctataatcacagctacttgggaggctgaaccaagagaatcacttgaacccaggaggtggaggttgcagtgagttgagatcacgccactgcactccacctgggcaacagagtaagactctgtctcaaaaaaataataataataatttcatatgggttaaattttaaggtcagatgatcacaattttgatattttgtctaattttataccttaggtgacttagagcctgatttaacgtgactttgtcttgactacggatacgtggaactgcagccaaatatattgttctgtttttaaaaaacaacaaaaaaaaaacctgcttcagttactaggactgaagaaaactgggcaaaggggggcccaggaggctaggtccctacatctgccattcttggcagctgcatttcacggttagaaaaactcaggaaatagccgggcgtggtggctcacgcctgtaatcccagcactttgagaggccgaggcaggtggatcacctgaggtcaggagttcgagaccagcctggccaacatggggaaaccctgtctctactaaaaatgtaaaaattagccaggcgtggtggcaggcgcctgtaatcccagctactcgggaggctgagggaggagaattgcttgaacccaggaggcggaggttgcagtgagccgagattacgccactgcactccatcctgggtgacagagcaagactccctctcaaaaaaaaaaaaggaggaggaagaaggaagaaggaagaagaagaagaagaagaggaagaggaagaggaagaggaagaagaagaagaagaaggggaaggggaaggggaggggagggggagggggagaggaggaggaggaggaagaacaactcaggaaaggaggtctcacacactgcagggaggctccaagctacaaagttgggggcgatgggggggaccagggctgccagtaccaatgccttcatccctttgaaggcctccctctcagaagcaaggaccccctccttggcctcaagtccccgccctcgttggttaaaacacaaatcacttctctgtcgttatgacctgcctgtttttgactgaaatggtcatacagaaggaagtcagtttgaaatattggtgagtcaaaatgattaaataggccgagcgcagtgtctcacgcttataatcccagcactttgggaggctaaggcgggtggatcacttaagcccaaagctctctgcaggaagccccggacaccctggggcaggcgggaggagagggcagcacaacccaggctccacccagcttctctcagcttccacctcccaaaggccacagaggagcctgggacaggagcagagggcgggggttccagtgacttctggaacattcatgatggtccgtgcaaagcattcctgggagggtccgtgatcacctctgtccctgggtggctgggctccagcagcccttccttccttctgtccattcttccttctgcctgcacctcctcccagcatgtggcacccccacatcctaagcctgtgtcactttctttccatggattctttgaccgccttcctcttctcactgacttggcatctaggggcttcttggtggaggaaggtaactggtaagaaatgacatactgaggccaggcgtggtggcgcacgcctgtaatcccagcactttgggagatcaaggcgggtggatcgcttgagtccaggagtgcaagaccagcctgggcaatatagtgaggggaaaaagaaaaaaaaaaggaaggaaggaaggactgagaaactagcagagtcttctggctgtctgggtgtacggtccagccctacggggcttagcgggtgttctccctgtgtgcggagatgagagattgtaagaaataaagacacaagacaaagagatgaagagaaaacagctgggcccaggggaccactactaccaagacacggagaccggtagtggtcccgaatgactgggcgtgctgaaatttattgcgtacaagacaaggagggcagggaaggagggtgaatcttccaagtgattgacaaagtcaagcaagtcacgtgatcataggacagggggcccttcccttttaggtagcggaagcagagagagaacgcagcatatgtcagcgttttcttctatgcacttataagaaagatcaaagactttaagactcactatttcttctaccgctgtctactacaaacttcaaagaggaaccaggagtacgggaggaacatgaaagtggacaaggagcgtcatgaccattggaacacagcaccacagggaggggtttaggctgcgggtaggcctagataatatccagccttccacaagaagctggtggagcagagtgttccctgagtcctccgaggaaaggagactccatttcgcggtctgctaagttacgggcgccttcccagacactggcattaaccgcttgaccaaggagccctcatgcggcccttatgcaggcgtgacagagggttcacctcttgccttctaggtcacttctcacattgtcccttcagcacctgaccctctctactcgtcggttattcctaggttatattagtaatgcaacaaagagtaatattaaaagctaatgattaataatgtttatattaatgattgataattgtccatgatcatctctgtatctaatttgtattatgactattcttattctaactattttctttattatactgaaacagtttgtgccttcagtctcttgcctcggcacctaggtaatccttcgcccacatctggggacagtcctcatgtgttcctaagctcagcctcgagggtcctgggctggtcacctcaccgcatctgcactgtgtctctagatccagactccacgggaagggcttgggatgcctagcacaaaggatgcctggtgtgacaaacatccctccattccctggactgcagctcagcaaaaggtccaggtggtgccatgccaatttactgtccctttgagatgagcccatagggccttgtggggggcgagtgtgaagctgggcgcctggagcctaaggccagctgtccctccctgtgtcctggaggaggggccctgtcccaaaaagaccctcaggggcctggcctgtgagtgcagatgtggggaggggagagtctgtgggctgagtgggggccacaggaacggactttgagcaccatggctgaggggcctggtcagtgggaacctggacattgtggcctggtcagccgaggcctggtctggtcagtggggacctggaccttgtggcttggtcaacaggggccttgtcagtgggacctggacattgtggcctggtcagtgggggccttgtcagtgggacctggacattgtggcctggtcagcgggggtctgatcagtgggaacctggacattgtggcctggtcagctgaggcctggtcagtgggtacctcgaccttatggcttgatcaacaggggccttgtcagtgggacctggacattgtggcctgctcagcggggcctgatcagtaggacctggacattgtggcctggtcagcgggggccttgtcagtgggacctgaacattgtggtctggtcagtgggggcctgatctgtgggacctggacattgtggcctgctcagcggggcctgatcaatgggacctaaacaatgtgtcctagtcaatgggggcccggtcagcggaggctttgtgaatggggacacggtccttggggacatagtcagaaaacacctagtaaatgggggtgttgtcagcagggacctgctcggtgaggatctggtctgtgggaggcctggtcagctgtggcctggtcagaggggactgatcatgggtcctcgagttaaggacttagtcacttggcacctcatcagtgaggacctggtcagtgggcgcctggtcagcggaagctgggtcagtgtgatctgattattgggggtctggtctatggggacctagtcattggaaacctggccactggagcctgttcaatagaaaggtggtcagtggaagcctggcagtgagggcctggtcgttgggctcctgggtagtggggcctagtcagtaaaggtctattcagtaaggacatggtcagttggaattttcttagttggggcccagtcagtggggacctggtcagcgagggcctagtcagtgggacttggtcagtagggacctgggcactggagtcctgggtagtggggcctagtcagtaaaggtctggtcattcagggcctggtcagccagaacctcatctgttggggccgtgtcagtgagctctagtcagtggggacctggcaatggaagcctcatcagtgggtcttggatagtgaggcctagtcactggaggactggtcagtggggacttgggtaagggggcctggtccctaaaggtctggtcattaaggacctggtcagttggaaccttgtcactttgggcccggtcagtgggacctggtctgagggggtcttgtcagttgggcccaagtcagtgggagtctcatcagtggggcctggctagtggggcctggtcagtggaggtttggtcagtggggtcctggtaagttggagcctcatcagtggggacctagtcagtggggacttgtcaatgggacctggtcaggggacccttgttagaaggagcctggtcagtggggcctaggtagtgaaacctggccactgggggcctggagagctggggcctgctcagtgggacctggtcagtgttggatgtggttagcggggcctcatcaactggggcctggccagtgggacctggtcaatgggagcttggtcactgaggtcctggtttgtggggtctagtcagtaagggtctattcagagagacttggttagtagggacctggtctttgaggccctggagagtggggcctattcagtaaaggcctggatcactggggtcctggttagtgaggcctagtcagtaaaggtctggtcactgaggacctggtcagtcagaaccttgtcggttaaggacctggtcagttggaaccttgtcagttgggcccagtcactgggggcctggtcagtagggacatggttagtgaggacctggtcagtgggggccttgtcagttgggccaagtcagtgggagtcctgggtagtggggcctagtcagtaaaggtctggtcattaaggacctggccagtcagaacctcgtcagttaaggacctggccagtcagaacctcgtcagttaaggacctggccagtcagaagctcgtcagttaaggacctggccagtcagaacctcgtcagttaaggacctggccagtcagaacctcgtcagttaaggacctggccagtcagaacctcgtcagttaaggacctggccagtcagaatctcgtcagttaaggacctggccagtcagaacctcgtcagttaaggacctggccagtcagaatctcgtcagttaaggacctggtcagttgggtccagtcagtgggggcctggtcagtggagacctaggccatcagtgggtcctggatagtgaggcctggtcattggggtcctgggtaagtagggtctggtcagtgaaagtctcattgatgaggcctagttagtggggtccaggcagtgagggcctcatcagggggacctagtcagtgagtcagtgagggcttggtgagtgggggcctcgtcagtggggccttgtgcctggtgagtgtgaacctggtcttcaggggcctggtcagcaggtgactgatcagtaggggtcagtgcagccctggccagtggctgcctgatcattggacctaatccatcggggcctggcagaggtgggggaggggtgagggggggtggctgtcagtggggcctggtcagtgacatcctggtcagcaggctcctagtcagagggagcccaatcaataaacctggtcatcgggggcctggtcagtgaaaacttggtcggcagggttggtcagtgtgtcctggatattggggattggtcaatgggggaccaggtcggtggagacctggtcatcggggcccatttagtgagggccaggtcatggaaggcccgggtgatggggccctggttgcctggtcagttggacctggtcatcccaggactgatcctcagggaacactctgacttcaccaggctcccctgaccatgccagtccctggcctgcagccaatggtgtcctttgtgtctctcccagcacagacccaggcccaggggatgcccaatgctgggaggaggctcagacagcaggaaggagagaaggaaggaaggaacttccgtagtaccgatgcctacaaaattacaacacgtggtgctgtttctactccatcaccatgttcgctctttatttcctatgtaattctctattcaaccggcctcagttgagcacaaaaccatccttgtaccaccatgaatagttggccatggctctttgatagcaatttttgttctgccgtagaaattatccttgaaccagaaaaaaaaatccccaattcaacactccatttttgtgaagagctggttccgaattctgggtcactttttggaaaaaatatctgttgtggtaaacagtgctgcatctgtgatctcaagtctctactggaattggatagagatggtgaatttcagccagagcgcccaaagaactcgtgtcccgcgctcctgaacgccatcagccgccgcacctccatcttccctcctcccacgagtctcctgctccccgtgactctggtaagagctcctctgtgaacgtggaggtggtctgggaagttggcccagtgctcctgggaccgcactaacaggtccgagacggggtccaggtcctgcctgggccaatccgggaagagcttgccaatggcatcacaggcacctcggggaaggggatggtttggttcaggaccacccagaggcctgctgggcccactccaaggcctggctgaggccacagaagggctggccgcctgctgatgctccttcttgaagcccctcacctgctggcagtgagctccatgccctgtggctgagcagcagcgctgttgtccaccttcctgggcaagcatctgcagctatccatcttgctctccacctcctgcaggttgagggcagtggtgggggtagtgctcagggtcaggaaggagctgacccccaccatgccacccttctcacccttcctcttgccctgtttccaggcctcctcgcagtgttgctgggccacgtcaggaagtgctggaggacgtggcattgcaccaacaccaggcggccagccgtgtggctcatcccgcaaatcaggctcttcctgtgcatggagatggagtccctctggaggcagcccgtggccctgttctcgggcaggtggagcatggagacgactgggaacttcactagacacgcatccagccggttcaagggcttgtcgcgccgtgcaccagcttgcaggagaagtaggtctttatgtccttgaacttgttctactgagtggtgtcgccagcggtgcactgggttctcctgccacttggggccatggggtaggggttttcctgccacttggggccatggggccaagcaccaacagcaccatgcacacagcttgtccctgtctttcacagagcccaacgcctcgccaagcacgaaggcctcccttcccgacttgatgaaggcagagtagcggttgaggttgcggctcacagtgaccgagctcctgcccacgtggggacccagggagccgtcgagctccaggtatgcacctctgcccagtgcacctggatcgttcaccgtcatggagctgccatcccacttgtcgtcccagtcatcatcactgccctagctggcctagttgccaccaaggagctgctgaggccacggcttcagggcatccctaccgcctggaaatcctgcgctggctgctggaaggcactctgtggtggcaccagctgcggctgcagtagcagctggaaagcactgagagatggcttcaaggaggcaggcagtgcaccgggcagggccttgaaacctctgggtggtacaatggccatggcacagtgggtcaaggcacaggggcagccatggcgcgctgggccagtccagggttgcagaccacttgcactgcagatataaggccagggttgctgaggccatgagcccctgcgagtcagcccttgatgtcctgctcactacacaggctcagcacttcatgttctcatagatcactctcaaattttctgccatcaagtggtacagcaactgaatccacagtgccatgggttccctgcgtggtcatcctggccactgtggaggcacgtgacacctctagttcccctcccctcccagggctcaggttgaggccaggcccctctggtcctaggaagtgtgccctgagggtggggctctgtcctgcaggttgagtcagaggccgcaaggcacgctactgatggctagggctgcaggggtgccacactcacccctctctggggaagtcttagagtgaacggcgttctcattagagatgacttcccaaggcccaagagccatctagggctgtggagcagctagccgggtgctgccctaactccttccacaccgggctggtcactgccctccaagaggagtcggatgcaggtgccattgtgtagagaaatgtctctggatctgcctcttggttatcatggggcacagtagtttctggtgtctgggctctgatgaagccgtttagccgatccagggcagatgtggaagtgacaggagctcagcatccctgttcaaggtcataccacaggaaacacaagcccccaacgccagcctgctccatcggaagctttggcatggaattccaccagaggtaccgccagttcacccaaggtctgtcttgagctagggacggcctggccacaccctgagccccggaggttcccagagagcaaccttctgccctgggcgctgcagaaacccccttttcatgccactgggccttggcctcggggacagcctggccaggctagggtaagggaggaccaggctcccattccagaggagtcgcctgcatgtgctgctggagctgggcgggtgggccggggagggccagcccatcccccttgcagagaggctcaatgctgggaaatacccgaagagccctgggtgctggggtccctcccttaagtttgcctgaagagaatgcagatgaacccagcctctccaccaaacccatcagatgttgtcgcagggccaggttctgcacatctgggtctctggagtccttggggcccctctgtcctccaccctagcctgacacagaggacacccctgcaggctgcagatcccagagcaaggggtgtgtgcagctgcctgggtatcccccctgggacaggtaacacaggctttaggctggcttatgcctcgtatcctcatcccagggctgtggggccggggatgcagccctgattaggagctcaggtgggaagaagctctcactgtcacctggcccccttgccacctcacatgggggcctgtctcaacagtgggtgagatggccccaggcacggggtcctctccgctctctggggccatccactccatgccaggactggaccattcccacgcctggctgaactcttgtttctggccctgggccagagctcctgcccgtgtcctctccccgaatcctctgggccagaaacactgattctcctgttcacctggcatccctgaaggcgcgctgtggagtgaggggaccctgctcctcccggcgtctgttgatgctcacagcgggggcagggagctcgcacagaccagagagagtgtaaaaggtgcagggggcacccccgcctgtcttgagcagcatgtccagtacacgtgcactcagcacatcccctgaaaaccggcaggtctatttgtagaagtttctctgtgtagaggaggaagaggtgtgggaggaaggtccaggtagtagggctgcagggacccaggccccctctactatcaactgccccagaggatgactcaggaggggacctgatgctggagcctccctaggggtggcaggtcccagtgtctcctcgtcagttccttcatgcagacccaaaagtgcgtgagaaccacatcgtcctccagggcccaggcctgggagaacgtctcctgaaccaatccttatagtccagactgggacatattcatgaggcactctagggacaagggggtagcatggaaggggtcggtgcccacacccaggtttccaccacagctacctcccactgggaggttctgggtccttttgcagccacccctggcttccagctgtgcacaggaggccatggccagggggaggcctgggtgaggaggtgcccaccacactcctgcctttgatctgggtcttgtcaaggtgggctccttgtctgggaggactcagtgtcctgctcagcacaacaggcccagcctggccctccagactgaagcaaagggtcatggggacagtgtgagggtgctgtccctgggccagtccaggtctgtcctggggagtggggctgggggtcttcctggcatgttcctggaacagagtcactgtgaggatgaacaggatgactgtctgcctggtcagcacagaacgggcacccagtgagcactcgaggatgaccctcctcgggcagctgccgcccacccagtagcgactgtccccaagtcagcagggagggaagagagcaggtcacgctctcctaagtctgatcaagcagccgtgcagagatgtgcctctcacctagaaaagagaaaagcgtcctttgggcagaacccactcacactgtgtctccaactgctctacgacacagagccgggcaggtacctgggtgttgggtaatggtgacattgtgggctcacggcacccatcacaacggagccctgcatgggtcagcagggcccagagacggcatcctctgcccctcctgaactgtcgacgtgtgcgtgcaatgcgtctgtgcacttgagtgcaggtggatatgtgcgggtgcgtgtgagcgtgtgtctctcctccggccggccctggcttccccaatcacgtgtgcccccatgtcctcatcactgtcaccccagggcctgtggtcagcatcagagcatccacaggtgcgccccagcctctgccttcaggcagggtggtcctggggatgcaggcagggcagggcagtgccgtgggtgaaaccccctccctcgggagggactcagtgtatacggtactaaatctgcatagcagggccatattcaatgcacttctcctcctcccagtagctctctggggtgcagttgatttcatctcccctacaaatggaagaaaggaggcttctaggacaaaccccctgcctgaggtcacccagcagccagctgacctcgtccttactaagtccccactaaccaggcccccactcaccaggtccccacccaccaggtcctgttgactaagccggactgatcgtgttctgtgctgaccaagccctgcagactgggtcccactgatcagtcccccccagtgaccaagccaccactgacccggtcccccgtgaccatctacccacagacaagggcccatcttcttaagtcaacccatctaagaaaatgggtttggccccagaccaaagccattttcttaagttccatggagctcactagggtataaagccaagtggggagaggctaagcttcagaatctggacgttttcaacatttccaggtatttccacattcttcacagtgatttcaccaatgtgctctcccaccattgagggtttctacctgcctccaaaactgctggtgttgccagacttttcatttatgttgggtgttgggtttgaaatgcctcatggtggcttcttgttcctcatgactggtgaggttgggtgcccttgtattttaatcctgtgccaactgggcccccccacccccacccccgccacttgctgtctctgcttcgtaaggagatcttcttgcccggtcaactccgagggatcacaggttcaggggtgcccccaaaatgagacacttagtgtttgatgaatgaatgatgatgttgaggccaggagtgagaggaaggtcagcaggcagacagggcccatgtggacagaaagggtttattccaagtccagacatgaccaatagcgataaaaagggggaacaattggagtaatccatgggagaaggagtgagcctgaatttgaaagatggagagaactggacgtggaggaggggagggaggaaggcagaacaaaggaaataagaagctgttgaccaaaatacatatgttgtgattccatgcatatgatcaaaacgtgatcgtgtaatcatgcacatttctcaaattcaaatggacaaggtatacataatttttcccattcctcccacgaagcacaactaaaaccctgggccagacatcatacataaaaacataagactctgaataagattcagcctttaaaaacaaagcttgtgtttacgtggatgaacccggaagacgttcagtgaaataagccaggcacagaaaaacaaatacttcctgtctcacttgtggaatctaaaaagctgaactcccaagtagaatggtggctccagggactgagggagggaggagggactgaacagatattggccaaagggcacaagaggaattgttcaacatggtgactctagtcaatgtattttattcttgaaaaatgctgagtagtctgggcgcagtggctcacacctgtaatcctagcacgctgggagactgagggggatcacttgaggccaggtgtttgagaccagcctgggcgacatagtgagacctcatctctttttttttttttttttttttcaatataaaaaaactgaattgctgagcaaattttaagtgttcttaccacagaaaaagagataagcatggaggtatggtcacgggtatgtcaaggaaatgttaaattagcttgatttagatattttacgctgtacgcctatgtcaaaacatgttctatgcatcatatttacaactttgtcaaaataaaaagtgattgggaaattggatcaaactagaaaaatgtaagactctgaatgatggagggaaggcagacacagtgggaatttcaggacccaaggaatgacacgaaagtcaattctttggtgttttgttttgtttttcgccacatacagcccaggcttggacctgaagaagctggcaacccgcgaacgccaacaggcacagtcgaaaaaagcaaaagaaaaatcccaaacaaaatcctgttctccctagccaaaggaccaggagagggggcagcccagcaagacaaaacacatttacacaattctggctaacctcagccagtccttggccgtgagttcgtttttctgccacctcactttggggctgggctggttctccaccctcgcagggtgcgtttctcaatccagacgctggggggcgctagtacctcgcgagctccgcgaggatcattcccgggacgccgcggagtcacctcccctcctagggacccagagcttcccagggccgcgcctgtaggttttccagaggtccccgaaaacgttaaagacctggaaggaaaaaaaaactgtaaaaccacacactttgatatttgacaacgtaaaagcaaggctgcaaaatcaaaatcaatgaacgcttgaaggaaatgtctacttagctagacatagtgccacctggattcactgttggctccagaatcccccccacggtgtcatcacgttggaaagtttttgtgggttagatgttctctgttggcaagaatgcctgtacatgcccaagaagcatatgagtttaatgggaccccaataacttcaaaagcaaaaagataacgatcctttctacttttttaactttgtgtgtgtgtgtatcagggtcttgctctgttgcccaggctggagtgcagtggcgcaatcacagctcactgcagcctcaaattcctggactcaaaccgtcttcccacttcagcctcccaagtagctgcgaggatgcacaccaccacgcccgactaattttttttatttttttagagtcagggtctcactatgttgccagggctggtctcaaactcctgggctcaagtgatcctcctgcctcggcctcccaaagtgctgggattataagtgttagccaccgcacccagcttcttcttgttttaacaggaagaaatacattcaatgtgagtgccttttaatgtttgatattaaacaagtcctccacgagtgcaggtacccagggatgtgccatacagccctctgccttcacctatgctgttccctttggcctccatcacccttcccttcccacatcagccaattcacctcccattcatccttcatattttagctcagtgttaccacttcaggaaaaccttccctggtcccaagggacaagatactgtttgtcttcacctggaacatcctaagggctcaataacgaatgaatgaatgaatgaatgaatgaatgaatgaatgaatgaatgaacacaggtgcataagcatgataggcttgtccttgtagggccttcccatgccactcaaaatacatatgacctcattgcaaaaatatgaatactggctcacaaagtcatcctgcaaaatcaggcacattcaacaacagccctgtgctgagccgtgtcggggcagtagagaaagctcaacccaaaaccctactcttgagaggctcctctctgggggttggagcacagagccagacacagacatcactggcctgtgtgttcaatgaaggaagggagggagggaaggagagaggccgggatgaatggttggatgggtggatggatgaagggatggaaggatgaatgagtggatggatggatggatggatggatggatggatggatggatgaatggaggaatggagggatggatggatgaatgggtagatggatgaatggatgcagggagggatggagggatggatgggtggatggatgaagggatggagggatgaatgggtggaggatagatgaataaacgaatggatggagggatgaagggatgaatgggtagatggatgaatggagggagggaggaaaggaggggtggatgggtgggtggatggatggatggatggatggatgaatgggtggaggatggatgaataaacgaatggatggagggatgaagggatgaatgggtagatggatgggtggatggatggaggaatggagggagggatggatgaatgggtagatggatgaatggatggagggagggatggagggatggatgggtggatggatgaagggatggagggatgaatgggcagaggatggatgaataaatgagtggatggagggatggatgatgaatgggtagatggatgaatggatgaagggatgaagggagggataaagggatgaatgactgggtggatggatggatgaatgaaggaatggagggatgggtagatggataaagggatgaaaggagggatggagagatgaatgggtgaatggatgtttagggatgggccagagcaagggcccggaaatggggagtagtgacaggaatatgtcccatagaaggtgcttgggcttggtatggaaagcagggtatgaggaatcgtctgtaggaacagggacattccaagcagaggaaactgcagaggcaaaggccctgcagctcaagaaaacctggtttcaggatacagtagggagtgggaaatgactacagaggagactggcaaggacaagtggagccaggttgtgagggacccatccacgacccttaaccatgaattttgccccaaggcatgcatcaaagtactggctattcttagtatcagtattaagatggtatgacacacccaagagtttattatatgctaatagcttcccctgttaatttcagtttggaaaacatgttttatagtgttcacactactctggtggtgcaatatttagtttttaaatcaatatgcctgtacaaaactgttacacaatggcccacaactgtaaccccagtgccttgggaggccaaggcaggaggatccattgagaccaggagtttgagaccagcctgagtaacacacatagtgagaccctatctctacaaaaaaaagaaaaaaaaatttttaatgttggaacatgaaaagatgttcaacatgattagccatcagataaatgcaaatcaaaaccaaaatgaggccaggcatgtaatcccagcactttgggaggtgaaggcaggaggatcacttgaggtcaggagtttgagaccagcctgaccaacatggcaaaaccctgtctctactaaaaatacaaaaattagtggggagtggtggctgatgcctgtaatcccagctacccaggaggctgaggcaggagaatcccttgaacccaggaggcggaggtagtgagctgagatcacgccactgcactccagcctggatgacagagtgagactatctcaaaaaaaaaaaaaagagagagaaagacttcacacttcacactccctgaggtggctataagcaaaaatataactacaaatgtcagcaagtatgtggagaaattggaatccttgtgcattgctggtgggaatgcaaaatggtgcagccactatggaaaataatctggcagtttctcaaaaagctaaatatagaactcccacatgcccccgcaattccgctcctagagatatacccaaaagaactgaaaacaggaccgcaaatagatatttgtacactgacatcatagcagctctattcacgctagtcaaaaggtagtaacaatccaagtgtccgtccgggacaatggaatattactcagcaatatacagaaataaagttctggccagacacagtagctcatgcccgtcatcccagcactttgagaggccaaggtgggcagatcgcttgagcccaggagttggagaccagcctgggcaacatggcgaaaccctatctctacaaaacatacaaaaattagccaggcatggaggtgcacacctctaatcccagctactcaggaggatgaggtgggaggattgcttgagcccaaaaggcagaggttgcagtgagccaaggtcaagccactgcactccagcctgagggacagagcgagagactctgtccaaaacaaacaaacaaacaaaacctcagacagtattatgagaactaggactttgcttttaattataattctgttagttcaatagaacctgagagaagactcaacacttatagaaatacttaaatagaaaaatagaagtctcagccgggtgcagtggctcatgcctaatcccagtactttgggaggccgaggcaagcagatcacgaggtcaggagatcaagaccatcctggctagcatggtgaaaccctgtctctactaaaaatacaaaaaattagccaggcatggtggcaggtgcctgtagtcccagctactcgggaggctgaaaggcaggagaatggtatgaacccgtgaggcggagcttgcagtgagctgagatggcgccactccagctggacaacagagcgagactccgtctcaaaaaaaaaaaaagaaaagaaaagaaaagaaaaatataagtctcaacaggatttgatgaaggctcaggcgtgagtgtgagagaaaggtagtcaagggtgacttcaaggttttggatgagaatgaccagaaggatggagctgctgtttactgagatcattaccaggtctcttgcatcctcaaaaaaaataataataaaaaggatattttctttttccttttttttttttttttgtttgagacagggtcttattctgtcatgcaggctagagttcagtggcctgatcacagttcactgcagaggtcaatggtttcagcgacctctggagcacttatgatgtcccaggtgaagacaaacagtatcttgttctttcaaaaaaaaagaaagttctaatccatgctgcaatgtgaaagaacttcaaaaacaagctgagtgctatgggaggccgaggcaggcggatcacgaagtcaggagatccagaccaccctggctaacccagtgaaaccccatctctactaaaaatacaaaaaaaaaaaaattagccaggcgtggtggcgggcacctgtggtcccagctactggggaggctgaggcaggagaatcgcttgaacccgggaagcagaggttgcagtaagtggagatcacacctctgtactccagccgcctgggggacagagcaagattctgtctcaaaaaaaaaaaaaaaaaaaaagaactggggatagaggccgaactgggtttggcacacagtctgtgggctcaaaagcaagaccagccaggaaacaagggcgcccaggaggtgtccgaactctcaggatgggagctcgaaggacgcagtgaccttgacgggagaatggtgatggaatctgcaatttacttacccacccacacagccctctcctagtagttccttgatggtgggagccacattgagtgtgtgtgtgtgtctttgtacgtgtgtgcacgtgcatgtaatatttcaggcatacaaaagcatagataggctgggcatggtagcacacacctgtaatcccagcactttgggaggccaaggtgggaggatcacttgagcctagaagtttaagaactgcctggacaagatggtgagaccttgtctctatatattaaaaaataaaagtaggccaggcgcagtggctcatgcctgtaatcccagcgctttgggaggccgaggcaggcagatggcgcctgaggccaggagttccagaccagcctggccaacatggtgaaaccccatctctactaaaactacaaatattagccaggtatggtgtgcacacctgtaatcccagctacttgggaggctgaggcaggagaattgcttgaacccaggagatgcagattgcagtgagccaattgcgtcattgcactccagcccgggcaacagagcaagacactgtctcaaaaataaataaataaataaacagcatagataggggccaggtgttgtggttcacgcctgtaaccccagcactttgggaggccaaggcaagaggatcatttgagcccaggagttggagaccagtctgggcaacatagagagaacctgtctctacaaaaataaataaataaataaaaataaaattaaaaattaaaaagcatagataataattcgtgctggaacacagcttgtattcatcacccaacttaagaagaaaaaaatcacggataatactgatgctgtatatacaccacttcacttccatttacctctctctctctgtgtctccctctcatttagcatttatcattcccatgcacatttttttttacctttacaacatgggatgtattcatgaacactatatagaattgtggctggatgtagtggcacgtgcatgtaatcctagctatttgggaggctgaggcaggaggatagcttgagtccaggagttcaagcccagcctgagcaacatggtgaaaccccatgatatggcgtggctgtgtccccaccaaaatctcatcttgaattgtagttcccataatccccacgtgtaatgagagggactcagtgggaggtagcttaatcatgggggtggttaccctcacgctgtgcttatgatggtgagtgagttctcaggagagctgatggttttataaggggcttttgcccctttctgctaggtgcttctccttcctgccaccatgtgaatagggacgtgtttgcttctgcttctgccatgattgtaagtttcctgaggcctcctcagccctgtggaactgtgagtcaattaaacctctcctttataaattacccagtctcagcctgggtgcggtggctcatgcctgtaatcgcagcactttgggaggccaaggcaggtggatcacaaggtcaggagattgagactatcctggctaacacgatgaaaccccatctctactaaaaattcacaaaattagctgggtgtggtggcacacgcctgtagtcccagctactagggagactgagacaggagaatcacttgaacctggaaggcggaggttgcagtgagccaagatcacaccactgtactctagcctgggagacagagcaagactccgtctcaaaaaaaaaaaattaaattaagaaaaaacataaaataaaataaattacccagtcttgggtctgtcttctttagcagcataacagactaatatgccccatctctaccaaaaaacaatatatatatatatatacaaaaattagttgggcatggtgttgcatgcctgtagtcctagctactccagaggctgagaggggaggatcacttgagcctgggaggcagaggttgcagtgcagatcacgctactgcactctggcctgggtgatagggtgagaccctgtctccgtaataaataaataaataaataaataaataaatttattttccccagttgtcacatggagacaagcccatcagggacaagactagaagtagacaaaccagtcaggtaacaactgctagagccaggtgctaaagacaggggcttggaacaggatgggtgtagaaaatgtagtgaggcctgtttggatacatggatatttttggaaggcggggtcaacaggatttgatgaaggctcaggtgtgggtgtgagagaaaggcagtcaaacatgacttcaaggttttggatgagaatgaccagaaggatggagctgctatttactgagataatcaccaggtctcttgcatccttaaaaaaaaaagggatttttttttcctttttttttttttttttttgagacagggtcttattctgtcacccaggctggagttcagtggcttgatcatagctcactgcagccttgaattcctgggctcaagcaatcctactgcctcagcctcctgagtagctgagaccacaggcacaccgcacccagctaatttttgtagagagagattttctattaatatcaataatctttttcaaagtgttgagtcttctcttagcttctattgaactaacagaattataactaaaagcaaagtcttagttctcataatactgtctgaggtttgtttatttgttttagacagagtcacactctgtcgctcaggctggagtgcagtggtgcaatctcggctcactgcaaactttgtctctgggattcaagtgattctcctgccttagcctcccaagtagcagggactacaggtgtgcaccaccacacctggctaatttttgtatttttagtagagacagggtttcaccatgttggccaggctagtcttgaactcctgacctcaagtgatccatccaccttggccccgcaaagtgctgggattacaggcataaaccactgtgccagacctgtctgaggttttatgtattcaacacctcacccattgattaagtcccagaaattatttaatcatcatatttatttgatcagtttgactttattaatatttgttccacagagctttacaggcatcctttaactgatttctaggattcaataaatttacattttttactttcttcaccaaacaacaaattcatttttataaaatttagttgaccctctgagagtttctttataccactgttctctcaagattgatattaattctgttagttatcttttcttttctttcttttttttaatgtttagttttttagagatagggtctcactcttttgcctaggctggagtgcagtggtatgatcgtagttcactgcagcctcaaccgcccaggctcaggcaatcctctctcctcagactccaatgtagccgggactacaggtgcacgccaccatgcctggctaatttttgtattttttacagagacagggctttgccatgttgccaaggctagatcctattggttttcaaatggtatatcacatttacttctataatatcttacaattacacttctgtttcatcattctcataacttactattacgtgttcaaccacgttttaggtatcatttaatacacattgctaggtactaaatgattgctatgtacattattgttagttttaaggactggaatatttccttcttataaagccaaaagaaagtattgacatgcaaggacagacaatgtttttgaggagcattgaaagccaaggagcagagaaaaggaggtagttggaagaaagaagggattctttcaaagctggaagaaattatagaatccttacatctggagctggattctccccagagcaggttttgagtcgaggaattgagtgtaaatattcaggagataatctccagagacccagtgagcacctggagaagagaaatgggaaggaagggtgcggttaaaccttcccctctgggcaggaagatcgcttgaacccaggaggtcagggccgcagtgagctatgatcacaccattgcactccaggctgggcaatccaaaggagtaatccctgagatataatactatagaacaccccagaactgccccactcaggagtgaggaagccagggactcacccaacaagccctgtccctcaacagccaagggtcacttctaggagtgggaactcccagcacatccacattacccccatgtgcaggctgagcctgctcctgtggtcagatgaagccctcgggcatagagacacatggtggtagaggtaaagggtcagtgtgtctgggagccatccacccagatgacaccctgcacatgggctgggggaaaataaacagtgttgcttcagtgtgtttgctgataaaaatgaaggagcaagccaggtgcagattcacacctgtaatcccagcactttgggaggccgaggagagaggattgcttgagcccaggagttcaagaccagcttgggcaacacagcaagaccccatctctaaaaaattttcaaaattagctgggtgtgctggcatgcatctgttgtcccagctcctcctgaggcggaaggatcacttgagcccaggaggtcaaggctgctgcagtgagctatgatctcaccaatgcactccagcctggggaacacagcaagatcctgtctctacaaataaaaattttaaaaaaggaataattgagccaataggaaggaggaaattctattgcaggaaagagttgggagaattgctgaatgtctgaacccaaaagaggggatgagatcgggatgcaatggggtcgggggctggcctcagccagaaccgtggacagctcctccgtttcctttctagttgacccaggttagctacggaagggatgaacgtctaaggcagaatagcgaattaggataaccacgggttaaggcacaagcataagaacagcaggggcagccacttctaggcaacattaggcagtatccaggccacatcctccctcctataataacaagacagaagtttccacttcagcctctgattggtcatgggctgtctccacttcagcctctgattggtcctgggctgtctccacttcagcctctgattggtcacagggccacccttcatagggtgtagccaattagaggcctctaaagggcacctgaggtgttgccaaattattctagcttaataaaaacctcagttgggggtgctcttgagccacttgctcgagcccacttccactctatggaatgtacttttgcttcgataaatctgtgctttcatgactctgttcttctgttgcttgtttgtctttagttgcttctttcttttattgctttgctttgttcaacactccaagaacttggacaactcacagtcaagaccttccgtctggtaatctggtaacatcttgcctgggtctctgagtttctactcttgggcctcttggaggaactcatgctcatcctcttcctgagcatattcctggtcactgggctgaagaacctgctcatcaacgaattgcttgagcccaggaggcagaggttgcagtgagccaagatcacaccactgcactccagcctgggcgacagagagagactctggctcaaaaaaaaaaaagaacctgctcatcatcccagccattgccactgacacccggctctctgtgctcgtgcgctttttccttgccaacctggccttcgtggtcacttgcttcacctccaccaccatccccaagatgctggacgtgcaaagagatcccttgtgtcatgtcaggatgcaaagggattccttatgctggttgcctgacccagatgctcttcttcatctgttaggcatccacagcttcctgctgactgcaatggccaatgaacactgtgtggccatctgtcactctctgaactccatcaggtctgtgacaccatagctctgtggcctcctggtggtggcctcctggaccttcgcattcaggaatgccctgacccacccagtgttactgacccgcctctcactctgcacctacgagtgggtcagccatgtcttctgcaacctcagccagctgctgaagttggcctgctcagacgccactctcaacaatgtgacggtgcaaccgctacacaaaacacaaggacatgaatgccattcagccacacattcttttggcacttcataataataatcacttttcctcccattttttgtggttgttgtattgtttaaacaggtctcactctgtcaccctggctggactgcagtggcatgatcatagttcactgcagcctcaaccacccaggctcaaacgatctcccacctcagcctcccgagtagctgggaccacaggcgtgtgccatcatgcccagctaaattttttgtattttttgtggagatgaagtctctccatattgcccaggctggtctcaaactctggggctcaagtgtgcctgcctaagacttccaaaatgctgggattacaggtgcgagccaccgcatctggcctcttccagttttcaacaacatggtcctcatttccatctgggacctcctcagaatggcctttgccattcatattgctacaacattctcatcactgccacctaggtaaactttgaaaagattgaggctttctctccttttcttttaagacttcaccagaatcacttttaaggccttgttcacaataacatagtctttttctagcatgcacctgcacgctcttccagcctctacccattacccagttccaaagctgcttccacattactgggtattttttttacaataacactccacttcttggtaccaatgtcttagtttgttttagctgctagaacaacatactttagactgaataatttataaacaacagaggtttattgctaacagttctgaaggctgggaagtccaagatcaaggtgccagcagattcagtgtctggtgagagcccatagatgatgccttcaaatggtggaaggggcaaacaagcccctccagggctttttttgtggggggaggggggaggtgaagtattgctctttcacccagtctggagtgcagtggggtgatctcggctcactgcaaccttcgcctcctgtgttcaagtgattctccggcctcggcctcctgagtagctgggactacaggcacgcaccactatgccccactaattttttttgtatttttagtacagatggggtttcaccatgttggccaggctagtctcagactcctgacctcaagtaatcagcccaccctggcctcccaaagtgctgggattacaggcaggagccaccacacccagcctgttgaaaaaattatttgaactttacaatttattgctggaaatgtaaaaaataaatgttcggggtgactgtcaaattgggggaaattctatcaagtttatgtaattttgagctgtaaggtttggaaaacaagcttctgtatatgacgtacattagagctgtgcaccatcggacactatagtgtccagttcaatgggaggaacctgttgcattgcaccctgacctctgactttgcacctctgtgtcacaatgtctttgctattgtgaatagtgcttcagtgaacacatgcatgcatgtgcctttttggcagactgatttttgttttctttggagtatatacccagtaacaggactactgggtcgaatggtagccctgtttttgggttttgttttttgttttttgttttttgtttttttgagatggagtctcactcttgtcacccaggctagagtgcaatggtgtgatcttggctcactgcaacctccgcctcctgggttcaagcgattctcctgcctcagcctcccaagtagctgggattgtaggcagccaccaccacgcctggctgatttttgtatttttagtagaggcggggtttcaccatgttggcccagctggtctcgaactcctgacctcaggcaatccacccacctcagcctcccaaagtactgggattacaggtgcgagccaccgcacccggccaggtagctctgtttaatttctttgagtaatctccaaactgctttccacagtggctgaactaatttacattttcatcagtacaggataaacattccattttctctacagtctctttaatgtctggtggtttttatttttgttttttgtttgtttgttcattttactttttcagaatagccattccgactggtgtgagatggtatctcattgtggtttttatttgcatttctctgatgactagtgatggtgatcattctttcatatgtttgctagccacttgtatgtcttcttttgagaagtgtctgttaatgtcctttacccactttttaatggggttatttggtttttgcctgttcaattgtttaagttccttgtagattctggatattagacctttgtcagatgcacagtttgcaaatattttctcccattctgtaggttgtctgcttactctgttggtagtttcttttgctgtgcagaaactctttaatttgattagatctcatttgtcaatttttgtttccattgcaactgcttttgaggacttagtcataaattcatgtttcctaggttttcttctaggattcttatgatttgaggtcttacatttaaatttttaatctatcttgagttaatgtttgtatatggtgaaagggaggggtccagttacattcttctgcatgtgacttgccagctatcccagcaccatttattgaatgggaagtcttttcctcattgcttgttattgtcaactttgttgaagatcagatggtggtaagtgtgtggctttatttctgggctctctattctattccattggtctgtgtgtctgtttttgtaccagtaccatgctgttttggttactgtagccctatagtatagtttgaagtcggataatgtgatgcctccagttttgttattttttcttaggattgctttgactattcaagctgttttggttccataagaattttaatatagttttttcaattttgtgaaaaatggttttggtagtttgataagaatagcattgcatctgtaggttgctttgggcagtatggccatttgaatgatattgattcttctaatccatgagcatggaatgtttttccatttgtttgtgtcatctatgatttctttgaagtgttttgtagttctccttgtaaagatctttcacctcctccattagatgtattcctaggtacttttttgtgtggttactataaatgggattgtgtttttggtttggctctcagcttggatgtattggtgtatggacatgctacggatatttgtacatttattttgtaccctgaaaccttgctaaaattgtttattagttctaatagctttttggtggagtccttagggttttctaagtatggaatcatattgtcagtaaagagagatagtttgacttcttcttttcctatttagatgacttttatttctttctcttgcctaattgctatggctagcacttccagtattatgttgaacagttgtggtgagagtggccatctttgtcttgttccagttctcaaggagaatgcttcaagttttttcatgttcagtatgatgttgttccctagcttcttgtggtttgctgccaatctttgatgttcctcggctcgtagacctctgcattcatcttcacacggcattctccctgtgtgcgtatctgtctttaaatgtcacctttttataaggacaccagttatactgtattaggagcccaccattctccagtatgacttcatcttagttattatacttaatcctatttctaaataaggtcacattctgagatactggggattaggacttcaacatatgaactgggagaagagacataatccaactcataagatttgctaaaaataaaaagaagaaaaggccgggtgcagtggctcacacctgtaatcccagcactttgggaggccaaggcaggtggatcacttgaggtcaggagttcaagactagcctgaccaacatggtgaaaccccatctctactaaaaaaaaaaaaaaaaaaaaatacaaaattagccaagcatagtggcacatgcacatgcctataatcccagctacttgggaggctgaggcaggagaatcgcttgaacccaggaggtggaggatgcagcaagctaagatcatgccattgtactccagcctgggcaacaagagcaaaactctgtttcaaaaaaaaaaagactctagtgagtggattcatagctgaagcaacatagtagcttatttctcacataacagaatcctaggtcagtgcatggctctactcctctcagtcactcagagacccaagtttcctgagtcttgtttcccacctatttcctaaacattgttcttgtttataagagcaaagctgtgaactctggattacaaaaaataataataatcagagtgcatagaggaggcaagcctattgtctggaaatgccacctacttttcacattccacactggattacacctagctgcaagagaggccaagaaatatgacattggaaccttggtccctaaataattgcgtgaagcagaatcgcatactgaactgaaactagagagaaaagtaaactttaaaatattgaattttggacctctcacttctttttactggagcttagacttttgtcctaacaaacgcagtaactggttccagaagtggggtacaccataaaaatagatggcatttgcttaatgacagggttgtgaggacgcagatatttcagactggaaagctgagtatcttccttaggccaaggcaaaacatttggtaaaacatggtcaaccaagttgctaggctgtgatttcgttattatagaaggggagaatggatttttgtagagagctagcagtccacattccatcctctagccaccaaatatataaaagcatgcttcttcccaccatggaatacctttatacccttcctggaagaaggcaatatcccatgttattgatgcatccagctcagagtccaaaatctctggctaaaacacagtcttcatcaggcaggtataagaaagatggggacttagtggtcaagaacttgaccaatatgcaaacagagatggaagaatccacagataaaagtccacaaagagttggagaaatcatctgaccctgatctctccaacagtgagtggtaaataggcttttcatttgaaaggctgaggtgggtggatcacctgaagtcaggagttcaagaccagcctgggcaacatgatgaaatcccgtctctactaaaaatacaaaaattagacaggttggccaggtgcagtggctcacgcctgtaatcctagcactttgggaagccaaggcaggtagatcatggggtcagtagttcgagatcagcctaaccaacatggtgaaaccccgtctctactaaaaatataaaaattaaccagccaaggtggcatgcgcctataatcccagtttcttgggaggctgaggcaggagaatcacttgaacccaggaggtggaggttgtggttatctgcgatcacgccactgcactccagcctgggcgacagtgcaagatgctgtctcaaaaaagaaaaattagccaggccatggtggcagatgtctgtattcctagctactcaggaagctgaggcaggagaattgcttgaactggggaggcagaggttgcagtgagccaagatcgcgccactgcactccagactgggcaacaaaagcaaaactgcatctcaaaaaaaatgagggagacagagaaggaaagaaggaaggaaggagagagagataaagaaagaaaaaggaaggaaggaaggaaagaaagaacaaaggaaggaaggaaggaagaaaaagaaagaagaaaaaaaagagaaagaaagaaagagaaaagaaaaaaggaaagaaagaaagagccagcactttgggaggccaaggcaggcagatcatgaggtcaggagttcaagaccagcctggccaatatggtgaaaccccgtctctactaaaaatacaaaaattagctgggtatggtggcgtgcacctgtagtcccagctactctggaggctgaggcagaagaatcgcttgaacccaggaggcggaggttgcagtgagccaagatcatgccactgcactccagcctgggcgacagagcaagaccctgtctcaaaaaaaaaaaaaacaaaaaggaaacttgagcatcctgggttttttgtattttcagagggtcttggaatctatcccctgtggataccgagggttgactgtgatttgggagtgtagagggatttcttattttaaaaaggaccccctaagccaaagaaggcagctttgaaggatgtcttaagattgtggtccttccttaaagaagtgattgtcaacaaggaggatgatttcactcgctcccagccccggggacatttggccgtgtccagaaacagttttgactgtggtgacgggatgggatactactggcatgtaacaggtagaggccaggaatgtggctcaacatcctccaatgcataggaaagtcttgtgctataaagaacaatccatgaggccgggcgcagtggctcatgcctgtaatcccaacacgttgggaggttgaggcgggaggattgcttgagcccaggaattcaagaccagcctgggcaacatggcaagaccccgactctgctaaaaaccaaaaaacttagctgggcatggtggtgcatgcctgtaatccatgcctgtagctactcgggaggctgaggcaggaggattgcttgagcccaggaggtcaaggctgcagtgagccatgattgcagtactgcactccagcctgggtgacagagcaagaccctgtctcaaaaaaaaaaaaaaaaaaaaaattattcaggcagcaaagagttaaggtatgccgtcccactctgcacctactttgaaaggtagctacaaaccaggcgcagtggctcatgcctgtaatcccagcactttgggaggccaaggcaggtggatcgtctaaggtcaggagttcgagaacagcctggccaacatggtgagaccccatctctactaaaaatacaaaaattagccaaacgtggtggcgggcccctgtaatcctgactactcaggaggctgaggcaggagaatcacgtgaactcaggagacagaggttgcaatgagccgagatcgtgccattgcactccagcctgggtgacaagagcaaaactccatctccaaaaaatattaaaaaattaaaaattaaaaattaaaaaattaaaaataaataaataaataaataaaaagtagctgcatttagctgggcatggaggatctcacctggaatcccagcacttgggaggccaaggtgggaggacagcttgaggggccaggagttcaagactagcctgggcaacatagcaagatcccacctctaccaaaaatgtaaaaattaattaaaaaaaaagagaaagaaataaaaattagccaggtgtggtggcacacacctgcagtcctagctacttgggaggctgaggcaggaggatcacttgagccaggagttggaggctgcaatgagctatgattgcatcactgaactccaccctgggcaacagagtgagaccctgtctctttaagaaaaaaagaaaagaaaagaaaagaaaggtagcagtaaaagtgagacctaaccaggccaaatctaggatcccaagagaaacaccttggtgacagttgtcatcccagagacacaagtagttgtcaagaactgtgaagagtctgggatcttatcctacttgcaagtggacaattgaacctgctacagttttatggatgtgggcagaagacacgagactccagtatcagagacaaaggactttattactcatggcacagcaggcagcatgaactttgtgtttgcactagcccacattgggttagttccacagccaaggaactctgagcttaaagatctcgatttttatagttgattgcaaacaaacctggtctattttaataccagagggagacattatctttattatatggatagcaaatgaaactgccctctgcttcacaggaagaaactctgtcttccaaggctgtttgctatacaaacatccttgaaaagatagctggaataaaagctgtctgagcccctgattttggggtgtacagaaatgcaagagacccgtggagaattgttctccaatgacaccattgacacctaatgggcagtggctgtccatgaaggtaactcaggtaggaggttgaataggggaggctgctcaggttatagtttgtgggtcaatgtgtagaatccggagtcagccactcttggttcaactcccaacaccaccacttcttagctgtgctggcttgagcaagttacttcacctctctgtgcctcaatttctccttttataaaatggaaatgacagcagcacttatctcacgaggttattgtgaaaattaagtgagctgatgtgtgcaaggcacgtagaacagcatggacacattaaagacatgtcagtgttaactataattattattaattatcgtgacgatgccaccaagcttgtggtcatgcctgttttacgggattaatggccaagctctctaacccacacagttccctcggagtgtggctcagagactttggggaggacttagagcccttttctccttgcccgccccaccaatggtttgccccttcccggataattttttttttttttaaacaggatcttgctctgtagcccaggcaggagtgcagtggtgcaatctcagctcattgcaacctctacctcccgggttcaagcaatacttgtcagcttcccaagtacctgggattacaggtgtgcatcacctatgcccggctaatttttttgtatttttagtagggacgggatgtcaccatgttggccaggctggtctcgaacttctagcctcaagggatccaaccccttggcctctcaaagtaccaggattacaggtgtgagccactacacctggtctagaaactctttttttattaagagatagagtctcactctgttgcccaggctggagtgcagtggtaccagcatggctcactgcagactcaaactcctgggctcaagtgatcctcctgcctcagcctctggagtagctgggactacagatgcatgccaccacacccagctaatttttaaattttttgtagagatggggtatcgctctgttgctcaggatgatcttgaactcctgggctcaagcaattctcccacctttgcctcccaaagtgctgcgactacaggcgtgagccactgcacccagcttcagggtcatttttattgtcatccttgtcatcttattactctattgtaccccatgaaatgaaactccatagagtgcaagctgagaacatttttgctcttttctattggaactcagtaaactcacctgttgccttggtctctttgcatgtctcaaactgcaggagacacatttgggggcagtccccatcctctcttctgttgtttgatctctgcagcctcaccacccaccacaccacaccacaccacatcctcacctctgcattcaacggcagacactctcacctgccctcagtcccttcctcctatgaccttcgcatagaccccatcaccaccgttcaggcctccctcaattgccacttcctcagggaggctttttcctgacttccacccaagactaatcaggtgcctgcattttgcatgcattaacatttttaggctgggcgtggtgactcatgcctgtaatcccagcactctgggaggccgaggtgggcagaccacctgaggtcaggagttcgagaccagcctggccaacatggtgaaaccctgtctttgcaaaaatacaaaaagtagccaggtgtggtggtgcatgcctgtaatcccagctacttgggaggctgaggcacgagaattgcttgaacctgggaggcggaggttgcagtgagccgagatcgtgccactgcactccagcctgggagtgcaggacagagcaagactatctcaaaaaaaaaaaaaaatttagctcacactctgggtgcctgcccagatccactgggttcctactgtttctctccacaccaaggggtacttctagcagcttcatctctctgctagggggagaggcggtcttcctccagctgctgaagtgagtgtgacccatacaagggcagatcagcacaatcaacagcccctaagagcagccttcaatcaacagcagcatggaattggtggataaataccccagctccttcgcccctcagctgggacaactccaaagagcatgctctctgctgcctccagaggccctcagtgggactgcaccctatttgtccatggcagtaactggtttcataatgcatgcttaatggttactttcttttccctatttcacttcccatcctctacttgtatctccttgggtcacttcccaaataaactatttgtccttgcattttttaagagatggggtatctgatgcccaggctgaagtgcagtggtgcaataatagctcacggcaggccaggcacaggggctcatgcctgtaatcccaatagtttgggaggccaaggcaggaagatcacttgaacccaggagttcaagaccagcctgggcaacatagcaagacgccacctctacaaaaacaaaaaagtatccaggcatagtggcacatgcccgtagtcctagctactcagcgggctgaggtgggaggatcaattgaagctgggggatctaggctgtagtgagccacgattgtgccactgcactccagcctgggcaacagagtgagaccttgtctcgagaaagaaagaaaagaaggaaagaaggaaagaaaggaaagaaggaaagaaggaaagaaggaaagaaagaaagaaagaaggaaggaaggaaggaaggaaggaaggaaggaaagaaagaaagaaagaaagaaagaaagaaagaaagaaagaaagaaagaaagaaagaaagagaaagaaagaaagaaagaaagaaagaaagaaagaaagaaagaaagaaagaaagaaggaaggaaggaaaggaagaaaggaagaaagaaagagaaagaaagaaagaaagaaagaaagaaagaaagaaagaaagaaagaaagaaaagaaaagaaagaaagaaaaaaagaagctcactgcagcctcaaactccagggcccaagtgattcaactaccttattctcctgagtagctgggacgacaggcacagaccaccatgcccagctagtttttgtatcttttgtagagatggggtcttgctatgctgcccaggctggcctcaaactcctgacctcaagtgatccttccacctcagcctcccaaagtgctgggattacaggcgtgagccattttgcctgacctccttgaacttttgtatcaaaagacagtcatttgccctattgtaattcattccataattgcagttattggttgtcttgccccactgggatgagtcatgtccaccacagtgttccaaaaacacgcacatggtagtagatgcttgataaatgactctgggtctcatgactgggaggtggctgggatgctgatgggctgttctctttcccccatcctgtccttagaagcccccagttggagaggttgtagtgcaggagggaagctcactcctgagctataaatggcagcctccacctgcctcatgctccagaatacacagcctgaacagctggggcagggcccccagcgtccgggaaccccaaatgaccctcccggccctgaccagggctcctggggtgttccctggagctcatgcccagaggggatgtaagtccattaccaaggctgcagacgacacactaaagatgctgatggggtcatgcagctagtcctagcgccattcctagcctgtgtctcccctcctccgcatcagactccacctctgggagctccctttgcaagaaaccgtaccagggacaagggtcttccctacaaggccatgaagcacgcagatatctcctgcgggaggaatctctttccgaggtcggtggtgtcaggcctggaattagccacaccacctgcggcgaggctggtcccagggtctctggggacacagcgggggacagcaggggtggagaggacatcaggactgacctctgatgactcagcctgagatagtgaagagaatgagaaatggtgggcatggaggcctggttgtggcagagcggggtgggtgagggagtcttaggacttcttgccagctcggtcctagagtcagctgggccactcacaagctgggtgactgtgggtgagtcactctgggcctcagtttccctatttgtaacacagggaggggcttataaccgcagctcattcctggagttcattgtaaaggcaaaggggcctacgttgcagctgcctcacctggctggatggcctctgacatagagggccagcctcaatttcctcctctgtaaaaatgggaataaaaggccaggcacagtggctcatgcctgtaaacccagcactttaggaggcaaaggtgggtggatcacatgaggtcaggagttggagtccagcctgaccaacatagcaaaaccccgtctctgctaaaaatacaaaaatttagccaggggtggtggcaggcacctgtagtcccagctactcgggaggctgagacaggagaatcacttgaacttgggaggcagaggttgcagtgagccaagatcatgccactgcactccagcttgggtgacagagcaagactctgtctcaaaaaaaaagaggggaataaaaacagtgcccccccctccagcttatggctcaaagtgggatctgtgagtcatctgctaggcttagtccatgaacagcatttcttcattatccacccagggtcctttcatcatgactgacgtccctcgagatgcaattattctggtctgcttttgtcacaggacgaaactgtctgtgtagcatgggggaggggtgggataagggaggaggatgaagaacggagttggggaggggtctgggcttggcccccttaactccggaacacagggagaagtcaatgtctttagcgcatgaaagaagttctagaatgttctatttgctaccttttcagcccctgcaccaacaggggtgaagttttcaccatgacaaagagaaggaagctggcttaatgaacagtgaggcagctgggagggggcagagggaagctggacactcttggcccgaacctacagtccccagtggcactgaccactacccatctcttccacgatcctgtttcctctacagccttgggcagaaaacaaggaggcctccctacctccacttcatcccacacaggagtcttgatgctgggtgggagtccaggagtctgtctaggaatccaggaaggcttcctagaggaggagccattgcatctgggccttgaaggatgaatagaagtttcctaggcagcgaagtgtgtgtgtgtgtgtgtgtgtgtgtgtgtgtgtgtttcattttaacaaacactttcctatcttctaggggccaggtactcagaagaccacagacaagacccagccccatggcctgccccaaagagttcacatctcataaatgatgcttgaataataacaataatagtaacagctcccacatgctgagtgtgcgctgctaggacacagcatgtgacaggaattcagtgcctgaatgaatgagccaataaattaaactttctctttaaaaaaaaaaattctttttgttttattcttttagctctactatctaaggaaggaaaaagctttctggagtcagcaaatcctgcccttgattgctggaggggagaacggaggcatagtagggtcaaggagatggacggcacaaaggcctgggggtgggaaaactggagtacaggggtccagtgtggagagagttgggggcagagtcttaagcggggagctaaggcactaaggccgtctcctgttctttgggaactggggagccacaccttgattcccagcacaagagggaggaaaggaagacctgagatctagagaggacagcaggagcctgccctgggctccaagagtttcagagatggcccagatcagttgattgagtggccttctccctgtcatgagccacaagcagtagaagccacaggggggcagaagagatggagagatggagagagacacagcgacagtcaccagaagagagacaggggcatggcagaaagaggtgggagaaatccaggaaggctccctgggggtggtggccggaaatagggtggaggcctaatccctgatactagagaggcaggacctagaggggaggagaaagcttgatgctaggcaggaagtccaaaagtctgtctaggaatccaggacggcttcctgaaggaggggccattggatctgggccttgaaagataaatagacgtttcctacatttcctaggcagagaaaagtgtgtgtgtgggcggtgggggaggggggaaacggggaattgctcattttacttaacaagtactttcccatttttaggggaccaggtactcagtgggccacagacaagaccaaggcagaaaagacaggcgcctccccacattgcagcaccgggaccccgagcccacccacagccctcttcattcctcccaacgatggatggggaaactgaggcagcccagagcagcccccaccctaggtcctgcccgggacacgcccacgcgggacctgtgtcaccaggttaaaaatggaaacagctaggaccttttttttttcttcctttaagaaaatcctaggtccaaataaggcgagggctgccgggagcacggtgagctggccaagtcctcctgagcaagcgagtggcggctggcccggccggcctgggcttgggcctcctccaagactcgcctggcaggagggcggaggcaccccgggaggctataaggccctctcctccaccctgccaggctcactctgccccacagccacagcccctgactgccgcagcccccacagagcccgccgcgcaccccacgtcccccacgccagcgcccagccatggaggccatcaagaagaaaatgcagatgctgaagttggacaaggagaatgccatcgaccgcgcggagcaggcggaggcggataagaaagccgctgaggacaagtgcaagcaggtgaggtgccctccgctgggccgctccgggctgctgggagtcctctctgtgcggaaggccggggtctggagcccagttgggggtcgcagacacctgcgggaggataggaggctgatgctttggcggaggaagagcgaggggaccattgccttccttggatggggtcctgggctggaagaggggtgacgatcggacccacccccagcagggccagtgcgaacaaagtgagtttgacagagagagagttggcgggggagggagagtgagaacgttcgtgagcgaggtgtcgtttgcgctgggaggttgtgtactagatagggcggttggggacatgctgtgtgtgtgtatttgcgtgtgtttgagcgtatgtgtgtgtacgtgtgtgtgtacgtgtgtgcgtgtttgcctctggtgtgtgtgtgcatgtgtgcgtgtgtgtgtgtgtgtgtgtgtgtttgagacagagtctcgctctgtggcccaggctggagtgcagtggcccaatctcggatcactgcaacctccgcctcctgcgttcaggcgattctcctgcctcagcctccgagtagctgggattacaggcacccaccatcacacccggctaattttgtatttttagtagagaccggatttcgccatgttggccggactggtctcaaactcctgacctcaagtgatccgcccgcgtctgcctcccaaagtgctgggattacaggcatgagccactgcgcccggccatttgtgtgtgtttgagcaattctctgtgtgtgtgcgtgagcatttctgtgtgtgtctgtgtgtgtatctgcatgtttgagcatttgtgtctgtgtgtacatgtattgtgtatgtttgagcgtgtgtctgtgtgtatctatgtgtttaagcatttctgcacatgtctgtgtgtgtacacatatttgtgtgtttgagcaattctctgtgcgtgtatctgtatgtgtttaagcatttctgcgtgtgtgtgtacacatatttgtgtgtgtgagagcagttctgtgtgtgtgtgagtgtatctgtgtgtgtttgagcctttctgtgtgtgcacatgtgttgtatgtgtctgttttacgtgtctatctgtacatgcacatatgtttcagctgaaaagagtgcggaggggtaaaggtgactgtgagaatgagtgtgtactaggagagctgtgtgtgggacgctgcgtgcggctgttggaaagtaggtgtgaaagagtgtgggtgtgtttgtgagcctgtgtgtagatggtgggggtctgtgagggtagcgggacaggctgactgtgtgtgtgcttgagcaaacgctggtatgacagtgattgaaagtacatgttgatgtggctatgtttgtgttggcatctgtgtatcagggtgatgggtttctgatggcgtgtgtgtgtgcacccacgcacatgtttggatgtgtgtttctgttgtgtgtattggtgactgtgcttctgttggggtgtgtgtgcatgtttagatgagtgtgtgtttctgttggtgtgtttatgtgtatgagtgtgtttctgttggtgtgtgtgaatgtgtatggatgagtgtgtgtttctgatggggtgtgtgtatggttgtgtgtttctattggtgtgtatgtgtgtggatgagtgtgtgtttctattggtgtgtgtgtatgagtgtgtgtttctgttggtgtgtatgtgtgtgaatgagtgtgtgtttctattggtgtgtgaatgtgtatggatgagtgtgtgtttctgatggggtgtgtgtatgattgtgtgtttctattggtgtgtatgtgtgttgtgtgtggatgagtgtgtgtttctattggtgtgtgtgtttctattggtgtgtgtggatgaatgtgtgtttctgttgctgtgtgtgtgtgggtgagtgtgtgtttctgttggtgtgtgtgtggatgagtgtgtgtttctgttggggtgtgtgtgtggataagtgtgtgtttttatggggttgcgtgtatgagtgtgtttctattggggggtgtgtgcatgtgtggatgagtgtgtgtttcgattggtgtgtgtgtgaatgagtgtgtgtttctgtcggggtgagtgtgtgtgtcagtgactgtttctgctggcgtgtgcatatggatgtgaggggggctgtgcgaacctgtgtgtgcgtgtaggtgacactatgcccctggatcaggaagcctccactgtgacagaagcccgctgtctcatgggcacctgcccaggagaatggcacggcatgtgtgtgtgtgtgtgtggtgggggcccagggctgtgacctgctgcaggggtgactgggtggggtctggggactgggatgggagtagagttgagagtgagtctgagaatctcattgtgtatgtgggggtgtccctgctaaaagcctggaggccggggcaggtgggctgcccgtggtggacggaggagagggaggccatttcccatctcctggcagccaagagcccacacagacccagaactttggagacaagagtcctgggaaccctggcaatgagaatgcattggagttccaaggccgtggccatggtttggggcagagcagacaggagcagtgggtgggaggaaggaagggagtcccctcccacagagccatgttccccacaatgtttatccacaccccgatgtcaactgccaagccctggggagcatccaggtctccgataaaccctgggagatgcctaggaccatggcaccgagtgcccagccccacccaggccaggagccaggccagcccggcagctaaaggcgaaagctcggagctcagactggccatgtttgagtcatggctcagtcgctaggtgtcccggacgcctgcatgagtgagatacggaagtgacagtagggcctcccttgccaccccatgacaggattagaggtgactgtacaggtggaacccttggcccggagcctagctcagagtaagcactcaataaatgtaggttgatttcctgccccgccctacttcccctttgggcctccccagccccccgtgccccagggctgccctaagagtatgtggcacattcgtgcaggccaagccccaccccagtgttccctgccacaagctctctccgccttctctgtgcccctccctggcaaacacagacattcatcctgtgctgggccagcttctagccatcatttagccctcaccatgagggacttagccagagattcggagagaaacaagtttatagcactaattcttactaaggtgtgagtggctatctcccaggacagccacaagttcaaaaaggaagaatcctcaaagcctccagccagctgcgtggccaaggaggttatgccttttttgtcccacaaagatgcccactggagtagacttgggctcaaagcaagtctacacagactagctttcaggcaaacctccatagactagcacatactttgtgtatatcagtctttaaatgtatttttattttttagagatgggggtctcactctgttgcccaggctggagtgcagtggtgcaatcacagcttactgcagcctcaaactcctagggctcaagcgatcctcccacctcagcctccccagtggaggtgcacacctccacgcccagctagttattttatttttagtagagacagggtctcactattgcccaggctagtcttgaactcctgggctcaagtgatccttccacctcaacctcccaaagtgctgggatcacagacttgagccacggagcctggtctttgtgactctcctagcttcatgactgaggacacgttcctgcacatttctgagccctcagtgtcctcatctgtgaaatgggaacacgtgaggccttctgaagttcaggtgtggaactcaagatcccagaattccgaagcagaagccagcgccccacaggagctaacggccagtcctgctggggaatagaggcacttagagcgcctgacgctgcaggaggccagagagagcagctctcgggccagcctgatcccagcagccaagcactgatttctggccctgcttacccagtgtgggaaaaggacaaagaggcccagcccggccgcttcctgcccactcccctcccagggcagcaacatcctccaccactggcctttgaccccacatcctgcctcagccctgccccaaggccccatttgcagggactaaggtaatcctatgacagatagggaaactgaggctcacagagggacaatgacgggcacgcgccaccaggcccggctaatttttgtatttttagtaaagacggggtttcaccatgttggtctggctggtctcaaactcctgacctcgtgatccgcccgcctcggcctcccgtagtgctggaattacaggcgtgagccactgcgcccagctctcatttattttttatcctcactgcctaccactgaagggtttggggttgtgtcttcgattcatcccaaacacttcctacagtgttctaatgctggggcccatagtggcctcagtcccagaactgaccctcaagaaactccaagctgagggagacagaccatgaatacctccagctcagaggtcagggccggaccagagggagggacagaggctgggacagctgtaggcgtggcgaaagctctgctcagggcagcagagcaggccaccagggttggggagccttgggactgagcatggagggacggtagatgccctcccagtgaaaagtagaaagtcattcttagcagtgggtccagcatggtctagaagtcaagcaaaccagctttggaatcagactaacaaagattcaaatcccccatctgtgtggcatcaggcaagtcccttcccctttcagagactcagtttgcccttctgtagtatggggcttccctgagacaatatttgtaacacgccctggccaggcatagtggctcacacctgtaatcccagcacttcaggaggctgaggtgggggatcacctgaggtcaggagttcgagaccagcctggcaaaaccctgtctctacaaaaaatacaaaaattaactgggcttggtggcatgagcctgtaatcccagctactagggaggttgaggcaggagaagcacttgagccagggaggtggaagttgcagtgagctgagatccagccactacactccagcctaggcaacagagcaagactctgtctcaaaaaatatatcaaaacaaattgtaacacgcccaacacattctaaatgccagatagccccctgtcggccttatccctgtcctcacatgttcttgcccaaacatttcccccaaaaaagtagtcaaaaccccaaaccaaacaaaaaaaccccaaaccagccaggtggggtggctcatgcctgttgtcccagctactcgggaggctgaagtgggaggatcccttgagcccaggagttcgagaccagcctggataacacagcgagatcctatctcaaaaaaacaaaaacaaaaacaaaacaaaacacccaaaccatcttcataccctgatgagtccatgctgtcagatttgctctcactcttcctacatgttaggagagtcctgtgttgggcacacagttggcacccaataaatgctgtgatccacagatctggaaggaagtcaggtggatgctgtaggtcagggttgacctatgaaacgtctttaaggaaactggctcattttctcagtcaaggcagaagttcaaaagcagctgccggaatgctcagagaccagcatgtcaaggtttctgttctgcagatggagaatctgaggccagaaaaggggacgggggtcgcagagcttggatttggagtcaggcttccaggctccccacccggaggtcaaggtcaggccctatagactctgaccctgccctgatcagctggccaccctggattgggccctgtcatctccccatagcttgggatgctcctgaggacttcagacaggatagccctccctgctctctgtcacatctcagctagagacccttgcaggtcacctcagtgacatcagctgaacctccagctgccagcctccaccccatcctccagctgacacccagcaggccgcaagatgggaagcctggagttcacactttccagctactcaggaggctgaggcgggaggatcgcttgagccgaggaggtcaaggctgcagtaagctatgatcacaccactgcactccagcctgggagacacaggaagaccatgtaaaaaaaaaaaaaaaaaaaaaacgcaaaaaaaaaaaataatgcacacacacacacagcaagatcaggttaaaaaaaaaaaaggcaaaaaaaaaacatacacacacacacacatatggggcacctggtacattttgcacatccactcaggggtgagcacgtagcccagacaggattcagagctcagtctagaagccacgggcacagcagcttttttaacataccctcttcaagaaaaaaaagaagagaagcaagtcagagagggaggaagggaagctggcctagtgtgaggaacagggccaagggctttgtctttgtcagctcaggcagttataacaaaacaccatagactgggtagcttcagtaatagacatttattgtttacagtctggaggctagatgtccaagatcaagatgctggcagattaaatgtctggtgagcgctctctagctagcttgcagacagccaccttcttgctgtgtcctcacattggaagaggataaccaagttctggcctcttctcataagggccttaatcccatcatggtgggtcaaccctcatgacctcacccaaacctcatcatcttccaaaggccccatcaccaattaccatcacatggagatgagggcttcaacacatgaattggagagggggcaaaagcaagcattcagttcattataggcttatattccagaagacctgggctcaaaccctgtgctgtgtgacctggggaaagtcatcccacctctctgagcctcctgctgtggggaggaagcaggagaatgaagctgggctcagtgggggctgtctgcccaccctgggagcaggaacaagatcagtgtcaaaccatctaaggcaaaagtcagatccaagccaggtgtggcgactcacgcctgcaatcccagcaatttgggaggccgaggcgggcagatcacttgaggtcaggagtttgagacctgcctggccaatattgcaaaaccctgtctctactgaaaatacaaaaattagtcagtcgtggtggtgtgcacctgtagtaccagctaccggggaggttgaggcaggagaatcacttgaacccaggaggcggaggttgcagtgagctgagatcgtgccactgcactccagccttggtgacagagcgagactctcaaaaaaaaaagtcagatccaggcatgagctggatatgatcaccctaatccagagttgggggcccagggagggagtttcagcctggaggtgacagaaaagtcttcttgagccaactctagaccggtgtggtggggggtgacaaagagaggtgatggggtctgtggtttgtaatccataggcctgagcttctcaaactaggagtgatgggaggataggactcttgggataaacagaggactgaaaatttagggaaagtaggggacatttttattaaaatgaacatggcctatatgcaaaaattttaaagatttaacccgagccttcaaagaaagtgatcctgtaggggcgagtctcttctagccaagctccccaaagcccagaaatgagggactaggtctgagcccttcagcccttcagagtattttggtaagacagtctaagaaccactgccttgggccatagggagccatagcaggttctaggcagaaagagggcaggcgtatttgttagaaagtttctctgaccccgtgttggggtcagaaccagagggagaaaggctggggacagggatgggcggagggatccacgcgcagagaatgagattgcttaactccagatcatggtgaggctgcacctctgaaactggaatgtgtgtatttctggaaaacatttggagtcttcagtttcccaaaagctgccattgatctccctagagtactggggaccccaataagcccaaaacagctggtcctcaggacgagggaaagatgtgaaaatcccactatcaggtagcatggatggcgtggtgcatgctatcgcaacccctgttctacagataaggaaactgatgcccagagagagacggaggactcttgtgaatattgggggggaccgcccctgcacctcggggacgtgaccccccccccaggctgacccgttcctcgctctgtcgtccccaggtggaggaggagctgacgcacctccagaagaaactaaaagggacagaggacgagctggataaatattccgaggacctgaaggacgcgcaggagaagctggagctcacggagaagaaggcctccgacgtacgtgtgcagggatgcgggagcccgcggcggggccaggccggagccccggggccgggaaggcggggagagccgcagggggaggaggaagaggaggaggagaaggcggcgcctcccagcgctttctccaaataagtcccgaaaaggggcactttccagcagctgtggccagcggtgccgacgtcaggccctcccccagcggtgctgacgtcggcggtccggccgggtgacctcatcgccccgacggcagccggcccggggggcggggagaggcgggggcggcccccgcgcaggcaaaggcttggggggccggggcgcggctgtgcagctctcgccggagccgagcccagccgagcgtccgccgctgcccgtgcgcctctgcgcctccgcgccatggccggcctcaactccctggaggcggtgaaacgcaagatccaggccctgcagcagcaggcggacgaggcggaagaccgcgcgcagggcctgcagcgggagctggacggcgagcgcgagcggcgcgagaaagtgagcgccccggcctcgggccccgcacccgcagcctcctcccccgcgcgccctcctttcttcccggcttcccgcgctgcccgcccgcgcgcagtcctcgggccgcctttttacgccctcggacgccgatcgccgacccacatccctgcgcccgcagccaggaccccctacttcctccgccgtcctccttcctgggcctgggacaggggagggggcgccgcctccgggtcgggcggggccggccaagcgggaaatggggggatggggcggagggggtgagcgatctccgggtggagaagtggagcggcgggagggggcgtatcgtgcaggctccgactccggggctggcgccggggtcccgggccgaggggaacccgcgaccggacttgtgggggagaatgaggatgaaaacgtggagcttccattgtctagggtttgaccggccgacagggatttcgacgggggaccggggatctggggagggggtcgcactttctcgcctctttcgcggcttcccggcttctgcttgcttccctgaccgttcccaggggcgcggcggcgacgtgtctgctccaggcggcgggggggatggggggtggaggaagttcagccccaagccgcccgcctttctccagctgattcctgcgggaaccggggcggcgggaccctgcctctctccagaaggccccgggaacgctggcgcggggccctgaacccacgatcgtttgagcgcctgctgtgcgcctccgccgcgagtcgcagggcccgagataaacaatgggtctgaaaaaggagggagtttcaccatcctctctgcatcatcctcctggctgtccctcgggacagatggtggcaccgccagggtctggggacagatttggattctggtcccatatcatgccacccacaggcttcatgacttggtatttgctctctaggagcttttttcccatctgcgagtaggactgataagaatcccgaccccccagagtagcagggagggtcccaggagtaaatctcaggcgtggagcctggcgctttgtaaataatcaattgtgttgttgttttttgttgttttgtttttgaggcagtctcactctgtcgcccaggctggagtgcagtggtgcgatctcggctcgctgcaacctccaccccccgagttcaagagattctcctgcttcagcctcccgagtagctgggattacaggtgcccgccaccacgcccagctaatttttttttttttattttggatttttagtagagacagtgtctcaccatgctggccaggctggtctcgaactcctgacctcgtgatctgcccaccttggcctcccaaagttctgggattacaagcgtgagccacggcgcccagcctcaattgtgttttctctgccctgggaagagctcatagacaaatggaggcaggggagctgactcactgatggagcgaggtctgcattccacgggttttctgtgcagttatgggagcatgacaggggaggctccaaaatggaggttgagctgggtcttatagaataaataagtttgctgggaccagagacatgggtgtgcacagactcagaggcaagaaagttgtatgatgagggtgggggggtgtgcggatagaggttgaagcccaaaagccctgaaagttcagtgttgaggctcagggtggggaccctagagaggcaaaagatgcccagccagatggaattggtggtgtgaattgccaggactggaaagagcccagatgggggctgcagcatgggccttggttgaagcctctaatcctgtaagggctgctttggcccaagaggccttagaaacccggtgtaagcctcaatcggtagccggtctggcctctttctcacacttaaccgacacagctcttgctctgatctcatcccaagtcatctcgctggaggacaattaactcggcttcaaaatggccctcagcctggagccaagatttaggagcaagaccgtctagttgggagagaagatgtttttggagagttgaagacttcttgaaaaagttcgaaaagttcttgaaaaagcaaaggatgcttctttccgtctgggagagggaaaacctctcccagggcaaaaggaactaagaccaggggtgggttaaaaaaaaaaaaaaaaaaacctttcactcttgtagaataagccaggagccggcgtgtggtagacttctgggcctgtttcccgacagctggtttcgtttagatttttgtgtgattaactgacatcttcctgttcctttgccacatgtatctagcaagcctcttttaccttataagggaaatcctttgtagcgtgtggaaggctttgattgcaggaaggggtggaacccaaaatgactcggccgtgactagcagtttttcaaaaatacatatatatgtatgcatgtacagatatgcgtgtatctcccaactccagacagctgaaaatctgccaaaagcgttgtttgccaggattcagaatttcccacataagggctactcacttcttaaaagacaactcatgaatcaagcacctctgtttgatctttaaaatcaattcctcgactgctaatgggtacacagttttttgtttgtttgtttgtctttggcgggttatgaaaatgtcctggaattcgataatggtgttggttgcagagtgtttttgcaacatcagttcctggcccagttactgaaggtggtaggaggagttaagatctaggcaattaaaaagaatgaaaggcacccattcatgggaaggcctcagtgacgtttcttaagacagtttcatcagtggttttcacaattctctgcatttggtgtttcagaggacactgcaatacgaaacacctgtgggagtgccctctttctgcttctaggaatctgaggctgagaaaccttcctgactctatttgtgtagtttttcggccacgttagcctcattctatttttttttcccccagtatgaactcagggcaggagagggagtggtttcctaataattttttttttttgagacggaatcttgctctgttacccaggctggagtgcagtggcgcgatctcggctcattgcaaccttcacctcccgggttcaagcgattctcctgcctcagcctcccaagtagctgggattacaggcgcctgcccccacacccaactgatttttttgtatttttagtagagatgcggtttcaccatgttggccaggctggtctcgaactcctgacctcatgtgatccacccacctccgcctcccaaagtgttaggattacggatgtgagccaccgcgcccggccttcctaataattttgatagccttccccagttcagggattcttcatttgttctgataggaaaaagctagcgtggcttcccttttcctctcggttgaggcccgtttgacccgttctcaatattccttccaaagagcaggcatcgctggaaaactcgccttgcctcgtagccctggcaggacctaggggacaggttctgacaaggaagagccctgggtgggtcttaagaggccattcatttcttaccaattctgagtcactgaataaaaccacttcccccagtggggcccctcggtttcttcacctgtaaaatgggtgcgatgtgtgaggatgaaattgcagtaaaataaaaccgtggcagtaagagatgcctttctctggcacatcccacctgctgggcataagcggcgccaccctctggagttacagcctcaaggcagtccggtaactaatcaggctttgggatggagagggccaggatgaggaagcaaccttcccaacaccacgtggctgtgaaaatgacaaagcacggtcgggcgcagtggctcacgcctgtaatcccagtactttgggagaccaaggcgggtggatcacgtgaggccaggagtttgagaccagcctgaccaacaagacgaaaccctgtctctactaaaaatacaaaaaaatagcaaggcgtggtggtgtccgtctgtaatcccagctactcaggaggctgaggcagaattgcttgaacccgggaggtagaagttgcagcaagccgagatcatgccattgcactccagccttggtgacggcgcaagactccatctcaaaaaaaaaattaaaaagaaaatgacaaagcggggattccagcccagcactttttggccctggagttcctggtttaatgcttcccattgtacttcctttcttgtaggtaaaaacaccttgaaaagccaataacactattggggtatgtcttccatgcctgcaaccaagttttctttccctttccatatctttttgtcctgccatctctcagccaggcggattgaaggatggaattccaacgaggctcccccgcctcgtcccaccttggtaattgcatggccaacatttaactgagggctccatagtcttgcatttatcttgccattcaggtgaatgggagcggaactcacaggacacaatgagccgggtcactgatggccttgctttctaagaatctcacagtgagccctagaactctctacgtggtaacactgtgtgcctttttcagagaagagcctatcttagatcttagcctaacgttgggtctattgtgttgctggagagaccagcactgacattcatctcaaagcacatggtatgtttgactcctatgttgactcaactacccatcttgtactgggacactcgctttttttttttttttttgagacggagtcttgctctgtcaccaggctggagtgcagtggcacgatctcagctcacggcaacctccgcctcccgggttcaagtgattcttctgcctcagcctcctgagcatgtggaactacaggcacgtgccaccacactcagctaatttttctatttttagtagagacagggtttcaccacgttggccaggatggtctcgatctcttgaccttgtgatacacccacctcagcctcccaaagtgctgggattacaggcatgagccaccacgcttggcgatgctcatcttttgctatggagtggtagatgtttttcccagacattttccgggaagatcatactgaaattttggtatgagtgtaaattccctatggcctggactcctgggtgggctttgacggggaagatcaggttaacagagggcaggacatgggggaggctcccactggtggctggcctgatacttcttaacatggctgcacctccgacctccccaggctgaaggtgatgtggccgccctcaaccgacgcatccagctcgttgaggaggagttggacagggctcaggaacgactggccacggccctgcagaagctggaggaggcagaaaaagctgcagatgagagtgagaggtaaggacgctttgaatctggtggcatccgtgtttgcttttagaaaatggggatcatgctgccgacctcgcagagctggtgtgaaagtaaacaaggtcacaaggacatgcatgtgtccacaaaaaagtgcatgacagcactttgtaaaccatcactccatgggtagagatgtttatccgtggccaggcacggtggctcatgcctgtaatcccagcactttgggaggccaaggcggacggatcacctgaggttgggagtttgagaccagcctggccaacatggtgaaaccccgtctttcctaaaagtacaaaaaaattagcctgccatggtggcgggcacctgtaatcccagctactcaggaggctgaggcaagagaatctcttgaacccaggaggcagaggctgcagtgagccgagatcgtgccattgcactccagcctgggcaacaagagcaaaactccatctcaaaataaagtgaggggtgtttatccttacggtaaccatgaaaagaaacttccgacagacagaaaggcaaacagaacgggcagatgtgagactgcaagtatgactgtccatggtggtcagtttgcaaagcactgcttctcgtattttctctgaaagccacagtgcctcttagtgttctctagacaccaaatttcaggtaggccggatgcagtgattcctgcctgtgctcccagcactttgggaggcagaggcgggcaaatcgcctgagctcaggagttcaagaccaactggggcaatgtggtgagaccctgtctctacaaaaaatacaaaaattagccgggtgtggtggtgcacgcctgtactcctggctactcaagaggctgaggtgggaggatcacttgaccccaagagtttgaagctgcagtgaggcaagattgtgccactgcactccagcctcagtgacagatgagattctgtctcaaaaaaaaaaaaaaaaaaaaaaaagcagagtactgtggagaggaggaaaggaaacttgggatgcacaggtgattgttagcagagctgtcaggctttaggcttttggacggtgacagctatttcagggacagttgcaaaccagcatggttaatgtacttgcaactgaccatgcaccaggtgccgtggctcacgcctataatcccagcactttgcgatgacgaggcgggtggatcaactgaggtcaggtgtttgagaccagactggccaacatggtgaaaccccgtctctattaaaaatacacaaattagctgggcgtggtggcgggcacctgtaatcccacctactcaggaggctaaggcaagatcccccagcttgaacccaggaggcagagggtgcagtgagccaagatcgcaccactgcactccagcctgggcaacagagtgagactctgtctcaaaaagaaactgaccacgttcctcacccgcccatggtatctgtgctgcaacccagccaccagtagggtgccttctcctcggtagccagatcattctctggcacgccttggcacaggctctctggaagactgagggtagattgtgtaattcacagaagcagcagtctgtgtgtggtggaaaaggagttccttgtgtggcaatggtgtgggcccgaccagtgatcatcgcgtctgcccctcattcacaccggagttctcacttgagccagccaccatgcttttgcagtataaacacctcccaaagattcatttctttttttttttttttttttgagacagggtcttactctatcacccaggctggaatgtagtggtgcgatcacagctcactgcagcctcgacctcctgggctcaagcgatcctcccgccacggcctccagagttccagagtaaagctgggactacaggcgcatgccatcatgcccagctaatttttttttgagacagagtctcgctctgtcgcccaggctggagtgcactggcgtgatctcagctcactacaagcttcacctcctgggttcacgacattctcctgcctcagcctcccaagtagctgggactacaggcacccgccaccacacccggctaatttttttgtatttttagtagagacagggtttcaccgtgttagccacgatgttctcaagctcctgaccttgtaatccacctgccttggcctcccaaagtgctggcacgcctagctaatttaagatgcatttctggttgtgctgctgtgaccactaaccagagattagaaaccagctaaggaatcttggagattgcatgtcacccaagctggaaatttcttcccaagtagtggaacagccagggcagagggaacagacgctactgcagactctgcttcagccactgaatcaagggagagagtggcagctccggcagccacggggcagtggaaggacccagtcacgagagttcctggctgtgcctgtggcctgggttagctgctgttcacagtcagaccagcctggctggatgctgacgttgagggctcccatattggcaaaccaagggaggctgcgaaggccagtctcttgtttgcaccatgtccccagaggcctttggtgacacccctgttaaagactgctgtgtctcagtagaaagaattatatacttgaagcttggggatctagagtcagcttctaccactggcactttctatggagccttaggcaagtcactttgatctcttgggtactacaaggggttttggggcaataaataacccagagagcttgctcacatgctgagggtgagacctcgtacaggtgggggagggtgttttgagacttagctgagaacgggtgacaccccacgtgaacatatttattggacagcaagaagcatatggtctctgtgctgggtgggaatgatacatatcaatgacacattatcccaggctggcctcttcttttcttttcttttcttgttttaaatacacaaggtcttggcagggtgcggtggctcacacctgtaatcccagccctttgggaggcgggcggatcgcttgagcccaggagtttgagaccagcctgcgcaacatagtgagaccccatctctacaaaaaaatattaaaaattagccaggcatggtagtgcatgctggtagtcccagccactcaagggactgaggtgggagaatcacctgatcccaggaaggcaaggttgcagtgagctatgattacaccactacactccagcctgggcaacagagtgagaacctgtctcaagaaaaaaaataaataaatacacaacgtcttgctctgtcacccaggctggagagcagtggtgcaatcacgactcaccgcagccttgaactcctgggctcaagcgatcctcctacctcagcaacattgcaaaacccccacctccacaaaaaatttttttttagtttagctgggtgcagtggtgcacacctatagtcccagctactcaggaggccgaggcaacaggattgcttgagcctgagaggacaaggctgccgtgagctctcagggcaccactgcactccaacctgggcaacagagtgagacaccatctctcaaaataaaagaaaaagaaagggggcacagactctggagtcagactgccaagggctgagcctcagctctaccacttaccagctctgtaaccttaagttacttaccctctctctatgccttagtttcttcatttgtaaaatgtggataatttacctgctccatagggcagttgtgaaagtgaaggcacttagaaaagtgcctggtagtaaagatgaagggaggctgggcgcggtggctcacacctgtaatcccagcactctgggaggtcaaggcgggcagatcacttgaggtcaggagttccagaccagcctggccaacatggcgaaaccccctctctactaaaaatataaaagttagccggtcacggtggtgcatgcctatagtcccggctatgctggaggctgagacaggagaattgcttgaacccaggagatggaggctgcagtgagctgagatcacactactgcactccagcctgggtgacagagcgagactccatctcaaaaaaaaaaaaaaaaaccaagatgaaggaaatgtgtgcacagagttccatctttgcagtgtgttacagtgctcagtagattcagagactcatttagatgagagatgggactaggggtggtgtctcacgcaattagccagacatggtgacgggtgcctgtaattccagctactcaggaggctgaggcaggagaatcgcttgaacccgggaggtggaggttgcagtgagctgagatcgtgccactgcactccagcctggatgacagagcgagactccatctgaaagaaaagatagatgagaggtgggtggaggggtgtgagtgaacggccgtcctgatgagattgctccttgcagaggaatgaaggtgatagaaaaccgggccatgaaggatgaggagaagatggagattcaggagatgcagctcaaagaggccaagcacattgcggaagaggctgaccgcaaatacgaggaggtgagtggggctggcagatggcgcagcagcaggaagtgggaggaaatgcatctgctgagatagggaggacaccggggccaacgaaaggaagctctcggttaggtcagctgtcctcctgcgtgaacatatgtttgtccagagacaaccacttggctaggaaactatctcccacgatgccagaaagtgctgcggacgcttgtctaacgtaatgggaaaaccgaatgatcagctcacttgtgtcgttagctgggagttttggcacagttgggcaaaaatggaggattgtggtcccaagccatggagtttcagaccatgcaagctcaggccctcctttgcctccctcgatggctcggctcttccctcccgcctcttgtctgcctcgctcctcaggcttgaggaagagaatcaggatttcctccaggccccaggatggctctttcagttgaagcgccagcaaaaggccaggcgcggtggctcgtacctgtaaccccagcacttcgaccgaggcgggaggatcacctgaggccaggagtttgagaccagcctgggcaacatagtgagaccccatttctaaaaataataataataataattagctgggtgtggtggcatgcacctgtagtcccagctacttgggaggctgaggcaggaggatcgcttgaacctgggaagtcaaggctgcagtgagctctgaccacgccactgcactccagccttggagacagagcaagaccctctgtcaaaaacataaaagggctgggcatggtggctcacgccggtaatcccagcactttgggaggccaaggcaggcagatcacctgaggtcaggagttcatgaccagcctggccaacgtggtgaaaccctgtctctacaaaaaatacaaaaattagccgggcatggtcgtgcatgcctgtaagcccagctatttggaaggctgagacaggagattcacttgaacccaggaggcagaggttgcagtgagtcaaggttgagccactgcatttcagcctgggtgatggagcgagactctgtctcaaaagaataaaaaaataaaaaagaggccaggtgtggtggctcatgcctataatcccagcactctgggaggccgaggtaggtggatcaggaggtcaggaattcgagaccagcctggccactacggtgaaaccccatctcgactgaaaatacaaaaattagctgggcgtggtggcacgcgcctgtagtcccagctacttggaaggctgaggcaggagaatcgcttgaacccaggaggtggaggttgcagtgagccgagactgtgccactgcactccagcctgggcaacagagggagactccgtccccctgcaaaaaaaagaaacaccagaaaaacccatgttgcagctggtctaggggtctgggtggggcatcattgggggctgtctgcagtggatgggagaggacacggctggtggggatcgggctcagctgggcctttctgtctctgcaggtagctcgtaagctggtcatcctggagggtgagctggagagggcagaggagcgtgcggaggtgtctgaactgtgagtggcagaacaggactgagcgaggctggctcgattcctggggcggagtgggaaggagctggctgtgttgggaattggctctgaccggggtctctgctcaagtggacgggcgtcaggggctcatggctcatcttttctcttggcttctgtgacaaagaggtggtgacttgttcttactgccatgggaagcactgcccacgtgttgaccctttctgcaaagatatgaggaaataggagtgagacaggaggcagcagggaagcccagaagtcccattttcccagagaggatatctcagggggctgtgccatcttaacagaacactgacctgctccagaaggcaggctcccccggtcagtatgtaaatgcttttgctcctgtcagtgtttggccgtgacacattcctggcgggaaggtgagaagcttaaccagaatcccacaagcaagcaccgaaaaacaaaacacctgtcctcttggccccgggtgaggaattcagccccacagagcatccgggagtgctgagagagatctggtttcacaaatccactccgggcttccttcccggagtgtcccctgcaaactcccattgctctctgcccgccttctgccctcagtcccattcttacaccttccggagtcggcctcatcaatcatagatttcacaagtccttgcagccttacccttggcaaaagaccaggagtgttttccaagccctccaaatactcttcgggcgcacctcgcctctgcctggtatgataagcctttgataagcccatagtatcacactgcagaaaaatccattaacattttctccccacattccttctgccccccaccgggggagctgtgtaggtttctcctttggaaaatttattgttggggcgattgctattattgccggctgtaagggaagataagacacaaaaatcctttgtctttgtgcagaaaatgtggtgacctggaagaagaactcaagaatgttactaacaatctgaaatctctggaggctgcatctgaaaaggtaggtggttggcttgagctggagggtggcttgctggactttgttcttttcttctcccgagggatgcaggagcctgtcaggttatggggaatctgccctttatttaacagtagcgttggtgcctggcagccagggtttttcccctacagaaagagctggatttctcctgcacactcttgagtcctcttccatggggtctgagcaccatctttgatctccatctcaggaggatagagatagaacatgaggctcttcttagcgagatctgagcatagttgtataaataaatacagagcctgcctctcacctgattcccctggttcctccagaaataccatctcaaaggtatagcaatgatcagaggtggaattgggctttttagtttgaaacagcacccaaagcagttgctacgtggcagctacgtcgggaacaaaggacacacttccacggccgaaccccactgaatttcccagcctcttcctcattcttgctcctgcttttgcagtttcacagacattctttgttctcccatcacctccaccccccacttttttttttttttttttgagacagagcttcgctctgttgcccaggctggaattcagtggcatgatcatagttcattgcagccttgaactcccaggctcaagcgatcctcccacctcagccaccacctgctattcactcaactgggtgtggctttccttttgcttgataaacccctattcagcctttttttttcttttctttttttttgagacagggtctcactctgtcacccaggctggagtgaagtggcgtgatctcagcttactgcagccttcgactcccaagttcaagcaattctcccacctcagcctcccgattacacgctaatttttataatttttggtagagatgaggtttcaccacattggccaggctggtctcgaactcctgatctcaagtgatctgcccgcctcgccctcccaaagtgctgggattacaggcatgacccactgcacctggcctagagatgagatcttgctctgttgcttaggctggaagtgtagtggcgtgatcatagctcactgcaggccccaaactcctgggcttaaataatcctatcacctcagcttcctgagtagctaggacttgcaggcatgtgccactactccaaaactgtatttttttttttttttttatagagcacagtctatgttgcctaggctggtcttaaactcctggcctcaagtgatcctcccaccttagcctcccaaagtgctgggattacaggcgtgggccaccgtgcctggctaatttttctagtttttggtagagacaaggtttcatcatgttggccaggctggtcttgaactcctggcctcaagtgatcctcccaccttggcctcccaaagtgctgggattactttgggaggccgccgagcctggcctcctgttcatcctttgagcttctgcttaaacatcacttctgagagtccttctctgatttctcatctaggttaggtatttctctgctgtgtagccctgtctatacttttgctggcattatgatttcttacatttattatagttactccattaattgcatgccttccttgctagattgtaagttgtaaggacaggaaccatgtcatcttgttcagagttgtgtccctagtactagcattgtgcctggcatatatctgtagtgtgtgtgtgtaattttttttttttttttttttttagtagagatggtgtttcaccatgttgcccaggctgatctcaaactcctggcctcgagtgatccacctgcctctgtctcccatatgtgccagccctggcatatatctgatactaggatgtgtaaggaatgaatccagttggtgtgtgtatgccagacactgccccgggccagggggatagatgtaacaccactaatacctcagctgctttgttttgttttgttttgagatggagccttgctctgtcgcccaggctggagtgcagaggcacgatctcagctcactgcaacctccacctcctaggctcaagcaattctcctgcctcagcctcctgagtaactgggaatacaggcgcacacaccacgcccagctaatttttgtatttttagtagagacggagtttcaccatgttggccaggctcgtctcaaactcctgacctcaagtgatccacccacctcggcctcccaaagggctgggattacaggtgtgagccactgtgcccagcctggcatctgctcttgaagagctcagagtcgagtctagtggaagggattgacaaagtcacagagtgctttgggaatacaatagagggaccttggtaggttgtgaacggtgtcaccaaggaggcgacatttaaaacagctgtaggtccagcacggtggctcatgcctgtaattccagcactttaggaagccgaggcgggaggatcgcttgagctcagaagttcgagaccagcctgggcaacatggagagatcccgtctctaccaaaaatacaaaaactagctgggcatggtggtgcatgcttgtgatcctagctacttgggaggctgaggtgagaggatcacttgagcctggagggcggaggttgcattgagccaagattgccccactgcactccagagtcaggcttcagtcatgacttgatcacttaatagccatgtgaccctaggcaaaataataacttcacctttctgtgaccctttcctcccctataaaatgggattacagataccaggctgtgatgccattaactatgtctggcccatggtaagcagctaataagtgttagttattattgggaggccgaggcaggcggatcacctgaggtcaggagttcgagagcagcctggctggccatcgtagcgaaaccccatctctgctaaaaataacaaaaattagctgggcatggtggtgggcgcctgtaggcccagctacttgggaggctgagtcaggggaattgcttcagcctgggaggcagaagttgcaagtcacagtgagccgagatcgtaccactgcactccagcctgggtgacagagcaagattctgtctgaaaaaaaaaaaaaagaaaagaaaagtataatttctgatgggtcatcatggggaggggaacattccatgctaaggggtgcattcatggacagggactgggactcaggagtccacagattatgatcagggagtgcctgtcaccctggggaaggtggtggagaatggggttggaaatacagagggggccttgagtaacagattcccagttatctccctttcttcgccatactttttatctcaagttctcagtttaggccttctgatcaataccatcctacaggactctccccaacatcctccacatttcacacatatttcttctgctggggaaaggtgcctgcctctactctgcctacttttttttttttttctttttgagatggagtctcactccatcgccccaggctggagtgcggtggcgccatctggcctcactacagcctccacctcctgggtttaagcaattctcatgccttagcctcctgagtagctgagattacaggcacccaccaccacacctggctaatttttgtatttttagtaaagacagcgtttcgccatgttggccaggctggtctcgaactcctgacctcaagcgatccacccgccttggcctcccagagtactgggattacaggcgtgagccaccgtgcctggcctgcttacttctttttatgcttcttcctccttttttttgagatggggtcctgccctgttgcccaggctagagtgtagtggtccaatcagagctctctgcagccttgaattccagggttcaagccatcttccctcctcagcgtccccattagctgggactacaggtgctcaccaccatgactggctaatttttaaattctttgtagagacggggtctcactatgtgacccaggttggtctcaaattcctgggctcaagtaattctcccaccatggtcccccaaaacactggaatcacaggtgagagccaccacacccagccctccttttctttctttctgttttttttttgtttttgttgttgttgttgtttgtttttttgagatggagtcttactctgtcacccaggctggagtgcagtggcgtgatctcggctcactgcaacctccacctcccaggttcgagtgagtcttctgcctcatcctccccagtagctgggactacagctgcatgccaccaagcctggctaatttttgtatttttagtagagacggggtttcaccatgttggccaggctggtctcgaactcctgaccttgtgatccaccagcctcaggctcccaaagtgccaggattccaggcatgagccaccatgcctggctgggcctccttttcttaaagcagtgttttggtttctcccacagtattctgaaaaggaggacaaatatgaagaagaaattaaacttctgtctgacaaactgaaagaggtgagtgtggtggcacccagcgagctctggtttctcctggggctggtcttgaagccatgatagtaactcctttcttcttatctaggctgagacccgtgctgaatttgcagagagaacggttgcaaaactggaaaagacaattgatgacctggaaggtatgaggttaccatctaaatgtttgccttgccctgccttcccctctgggacacatccacggacagttggggaatgtttgtggaggggctgggttgggctttgtttgccttaggaaagtaaagcgcatagtgatgtcatatctggatgtcctggaacactggaataggataatgcaaagcattcaggcttgaatggcccttttttttttttttttttttttctatgagacggagtctggctctgtctcccaggctggatggagtgcagtggcgccatctcggctcactgcaacctgcgcctcccgggttcaagtgattctcctgcctcagcctcccaggtagctgggactacaggcgtgtgccgccacacctggctaattgaattgccactttcaggaggtaaaatatctctgcttagttagtcccatgagcaagtatagagaaaagagtatggctctctctgattaaaaaaatattaataataaattaaaaatctcaggccaggcgcagtggctcaagcctgtaatcctagcactttgggaggccgaggcgggcggatcacttgaaatcaggagtttgagactaacctggccaacatggtgaaaccccgtctctaccaaaaatagaaaaaattagccaggcgtggtggtgcacgcctgtaatcctagctactggggaggctgaggcagggagaatcccttgaacctgggaggcggaggttgcagtaagccaagatcacgccacagctctccagcctgggtgacagagccagactccgtctcaaaaaaaaaaaaacttcacaatttccttctgtttgctcatttctgatagatgccttgcattttttttttacatgccttgcatttttgcagaagctctgtcccagggagctcaaagcttatcatagtatttaaaaaaaaaaacagaaatacagaaagtgtagggactgcaataaagactagtctgcaagtctggggcccacttctcccagaattttttcaagagttccagtgtttaacattcggcctcagaaattccagaatcttggggttcaaatggaatcttccaaactgcccatcccacccagaaaggacacattcttcagaccatatcttccaatgtttttttggggaagtgaggttcccatataagggaaaatgccccattccaaaatacgacctttggacagggtgacgtcattggaaatccgaaataaactgaggggtggggaccagtggggggaagctctgtcacttctggttaccactgttttgaagcttcattgtggctaatccccctgcagaacctcaaaccacttagagatcaactccatagatctttggttttcttcatctgtttcacatggaacacagctttctcctagtctgtgctttgtttgctcacgtgtttttttcttcctcttgtggttcatctgtggcactccattccgacccttgccttctgtcccctgtacttctgaactgtctccctggggacctccgccctctagatgagttatacgctcagaagctcaagtacaaagctatcagcgaggaactggaccacgctctcaacgacatgacctctctctgagaggcagccaggtcgctgccctctgtccttctcacatggtgcctcctacgcccctgtgggcttctaggagctccggtggcctgccttctggtttgaacgtcagagccttcttctgatgtgtctgtgactctacaaccgaaataaagacgggcagtcctcctcttcatgccccctcattctcattttctccacttgctgcctttgagctgtagctgtgtgcccttaaccatagcctgaaacacaaagtgggtggttagcctctctcactcacaaatgaaaagcttattacaaaaagaaaattatgcctacaggatgcttttctgaagacgtgaaaacaaaagcaaactgggcatgtgctctcagataccgctgttagctaacggcatctgcatgccaataatttttttttgtttttttgttttgagacagggtcttgctttgtcacccaggctggagtgcagtgacaccatcatagttcactgcaacctccacctacaaggctcaagctatcctcccacctcgacctcccaagtagctggaactacaggtgtgcaccaccacacaaggctaatttttgtactttttttttttttttttgaggcggagtctcactatgtcgcccaggctggagtgcagtggtgcaatctcggctcactgcaacctccgcctcccgggttcaagcaattctcctgcctcagcctcccaagtagctgagattacaggcatacaccaccacacctggctaatttttcttttggatttttagtagagacagggtttcaccatgttggtcaggctggtctcaaactcctgaccttgtgatccgcctgccttggcctcccaaagtgcagggattacaggcttgagccatcacgcctggccatttttgtactttttgtagaagcgggagggtttcactatgttgcccaggctggtcttgaactgctgggctcaggcagtctgcccacctcaccctcccagggtgctgcaattacaggcatgagccaccgcgcccatccccaatggtttttccttaaatagaaattgttgtgaatggaggctcatccttgtaaaccgcttaggcagcttaagagtcaacagggatttggaaaaaccagcaagcctgtgtcaaaaatgaggctccccttgaatggggcttgagctacagattcaaacagcggcagtgacattttgatctccatttcctccttttcttgtgtcttttctctgtgttacactgtgagtgtggtgactggggcttcccgtggctttactcttcactgttcatccagctcccagtcctgggaggaagttcacctccacgccctgcccttagaaaactgactgtacaaggagtgaacgggcctccatgaacagggaaagtgctgtgacgtcagaagacgtgaatttagaattcttttcccgaattccagaattgcctgagactgctaacatcaatctccattcatatttcagttagttataacaggaaccttgctttagtttagaatagctcttaaggttgacctgtgggtaataaaaggtcatgctttttcctacatgaggaatatggagaaaacaaggtcactcttttttttttttttttttttttttttttttttttcaagacagggtctcactctgttgcccgggctggagtgcagtggcgccatcttggctcactgcaacctccgcctcctgggttcaagtgattctcatgcctcagcctcccgagtagctgggattacagtcgcggaccaccacactcagctaatttttgtactttcagtagagatggggtttcaccatgttagctaggctggtctgaaactcctggcctcaactgatccgcccacctcagcttccaaaaatgctgggattacaggcgtgagccactttgcccggcccaggctatgctttgcttttttttttcttctttctttttgagacggagtttcgctcttgttgcccacgctggagtgcagtggcgccatctctgctcactgcaacctctgcctcacgggttcaagcaattctcctgcctcagcctcccaagtagctgggactacaggcatgcgccaccatgcctggctaattttgtatttttagtagagacagggtttcaccatgttggccaggctggttttgaacccctgacctcaggtgatccacccgcctcggcctcccaaagtgctgggattacaggtgtgagccactgcacctggcccaagctatgcttttctaatgatcaaaaacataccaatttgtcccaaaatttcaaatagtgcatctggttctcccctgcatcctaccaccactaccacctcaaattatcacagataattgacatttagatgttcaagccacatcttccagactaccccttgaacctggaaatggcatgaaaatctccaactagatcctgaattttcggtatccattgttattcctcatcctatttttttgtccaggtgggaagctctgtccccattactctctctattcatccattcctccaaaatgcacctcccctaaaccacctccacctttccaccctcagcctctccctgctcctaactgccgtccatcctgaacttctgcaaaaaccattcccctcacacattgccatatatatgcccttggaaagattacagactgtgtagggggctggtttttgtttggagtctgtgtgtttgtccctggaatttctccaggcatttctggactccaccctttgaagtaactatgcagcctgtctatccagttattctacctaactaagcacataagtggaatttcagagattagtgctatggccgggcacggtggctcacgcctgtaatcccaacactttgggaggccaaggcaggcaggtcacttgaggtcagaagttcaggaccaacctggtcaacatggtgaaactctgtctctactaaaaatgcaaaaattagccgggcatggtcatgggggcctgtaatcccagctactggggaggctgaggtgggaaaatcaatcacttgaacctgggaggcggagcttgctgtgagccaaggtcgaacctttgtactccagcctgggcgacagagtgagactccgcctcaaaaaaaaagaaaagaaaagaaaagagattagcactatggaggtctacactatctgttgatagtctgtgagccttgtcgtgattctcaagggcagttaacactttcagggaaagtcattttatctcagacctaataacaaaatagatgctaaagcatctgagtgacaagatgaagcgaagtcaggatttgtagtcaagagaccagggtttaaggcctggcgcagtggctcacacttgtaatcccagcactttgggaggccaaggcaggcggatcacttgagctcaggagtttgagaccaatctgggcaatatggcaagaccccatctctaaaattattcataataatattttatttttaaaaaattttttaataaaataataaataaagagaccaggatttaaaatcctagctctactactttaaccatgccaacgtgaacaagctgcttaggttttctgcaaaataaaggtgatatctctgttatgaggattaaatgagataatggagaaactggctcgtccaacatagtcagcattcagttaacatctattcacccagactggataggcccaggtcactgatctgtctgatagaatcctcccaggtcatagtcacttgactctgtgtgtgtgtgtgtgtgtgtgtgtgtgtgatggagtcccactctgtcacccaggctggagggcagtgacgcaatctcggctcactgcagtgtccgcctcccgggttcaagtgattctcctgcctcagcctcctgtgtagctgggattacaggtgtgcgccaccacacccggctaattttttgtatttttaagtagagatggggtttcgccatgttggccaggctggtctcgaactccttacatcaaggatccatggtgtctcatgccagtaatcccagcactttgggaggccgaggtgggtggattgcatgagaccagcttgggcaacatggcgaaaccccatctctactaaaaatacaagaattggctgggtgtagtggcacgcacttgtagtcccagctacttgggaggctgaggtagaaggatcacttgagcccaggaggtcaaggctgcagtgagctatgatcatgccactgcactccagcctgggcaacagagcaagaccctgtttaaaaataaataaataagaaaggctgccatcttctgcagtcatttttttctttctgtaaatttccaggctgatgatatcacattttatgaggcattttgctttcccccagcattttaatgagtcttggccttgtcccttatcagccatcacttactgcaaactaagttctctctcgtgctctgtcacgcatagctctaaatggcgtcttttttctctctctctttcttttttaatttaaattgtttcatcagctcagttacttaataacatgcctgtagaatggcttaaatttcgcatttacctggggtttgtctccgttctcctggattcatagacagttacacaattatgtgtataatttaaacagccattcccagaagctccgaaggaaagatgggttacaggattttagatttaactatcaaaggctcaggggctaattaactagcacttgggtggaaatttatattaagtcacacatatctaggactgaaatcttcatgtagcagcacgtcataggttctgaagtatttctcctttattcctcatcataacccccacaccacgcattgatatcgttacccccatttgacagacggggaaaacagacctaggaaggttagatgcttacttaagtgatacaactggagcttaagttcaggtattctgactcaagggttaccagagttcacaaggaaaaatacaggacaccaacttaaatctgagtttcagataagcaatgaataattttttaatcataagtatatctcttgcataagtacatctcatgcaacatttgggatatacttacactaaaatattatttgtggtttatctgaaattcaatttaactgggcgccctgcattttatcttacaactgtgactcccaaatttggtgcttgttccttagtattctgtgatgttctgctgtaattaaaaatacaaagtactggacaggcatggtggctataacccacctgtattcccagcactttgggaggctgagcagatgggttccttgagcccaggagctcaagaccagcctgggtaacatggtgagaccctgtctctagaaaaaatgcaaaaattggccaggtggtggcatgcacctgcagtcccagctatgcgggaggctgaggtgggaggatcacctgagcccagggaggtcaaggctacggtgattcgtgattacgccactgcacttcagcctggacaacagagtgagaccctgtctcaaaaaaaaagtactttctctcttgtgactttcaccctggcagtttcaggtttagaaatctttgggggggtgctgggcatggtggctcacacctgtaatcccagcactttaggaggccaaggtgggtggatcacttgaggtcaagagctcgagaccagcctggctaacatggtgaaaccccatctctactaaaaatacaaaaattagccgggtggtggtggcacgcgtctgtaatcccagctactcgggaggctgaggcaggagaattgcttgagcctggcaggtgaaggttgcagtgagccaagatcgcgccactgcactccagcctgggtgacagaatgagaccctgtctcaagaagaagaaaaaaaaacaaatctttttttttctttcatttaacaaagacgcttattaatttatctttccccatactcttaatcctcaccagagaaacttgcccaggccaaagaagagaacgtgggcttacatcagacactggatcagacactaaacgaacttaactgtatataagcaaaacagaagagtcttgttccaacagaaactctggagctccgtgggtctttctcttctcttgtaagaagttccttttgttattgccatcttcgctttgctggaaatgtcaagcaaattatgaatacatgaccaaatattttgtatcggagaagctttgagcaccagttaaatctcattccttccctttttttttcaaatggcaccagctttttcagctctcttattttttccttaagtagcatttattcctaaggtaggcagggtatttcctagtaagcatactttcttaagacggaggccatttggttcctgggagaataggcagccccacactttgaagaatacagaccccagtatctagtcgtggatataattaaaacgctgaagaccataaccttttgggtcaactgttggtcaaactataggagagaccagggaccatcacatgggtagggattttccatccagagccaataaaaggactggtgggggccgggggtggctattgtgggaagtcataacccacagatagatcaacctaagaatcctggcccttctccactctccaccatgcaggacaaacatcttctcaagcagtcaacgtagaatgcttgggaaatagtcataattacccacatatagtaattaatagatggtaattaattgatccttgatgtgatgttcttttgcatatttccttcattctaaagttgttccctggccgggagcgttggctttcgcctgtaatcccaacactttgggaggccaggacagatcacttgaggtcaggagttcgagaccagcccagccaacatggcgaaaccatgtctctactaaaaatacaaaaattatggtgacgcctgcctgtagtcccagctactcgggaggctgaggcaggaggatcgcttgaacccaggaagtggagactgcagtgagccgatatcgcaccacagcgctccagcctggtcgacagagtgagactccatctcaagaaaaaataaaaataaagttgttctctgaagagcaaatgtctcattccagtaatgacccactcagcaggaatatggtggagttcagtccaattcaggtcagccatatccaaaagaccacaagtcattactaagttgagcaaaagagtttttatctattagcagaaagggcctctctggcagcagagattaaaaactggcccaacttcatttccatacttcagggaacagcaaattgaggatttacttatctaggacttgaattccttctttgggaccaagttaataaaagaccaagaaactcctgattaaactggataatgaaggattctgtagacagggctgcacgtatcggctttgtttgacttctcttttctcagttaacatctcagagctagaacattccacattccccagcagcgtgtgggggctgactaaagtttacaattccaactaaaaatcaccctgcttctggcttatctgaatcccttacccaccccaccccaccaccctactcctatttattcagcaccacactacccaggaaatacactagcaaattgtgcaatggaataaaatccacactttagattcttgcaactgtatcatatgtaatagtatcactttttctacattttggtcaaataaatttttacataaactacaatttgcgtgaattttagaatgtgtgggggtacacagagcattttggttcaacaaatgttaaagggatggaaagggaaaataaccagagccaagaatgtagacaaggttatctatttgctttatactgtgacttcatgatacaaggatattacagtctcattgcaggcgagagcactcagcctcggtcactcgaaaactcctggccttccttatcccctacgctgcctaagccaggctgtgaagaatgagtaggattttaagagataaaagcagggaaaatcatctctgttgcctgagttaggaagatctgcctagctaaggctgagttacacatacaaaggaaagcagaccagcatgggcaccatagtgagaccccgtctacaaacaataacaaaaatttggccaggtacagtggccaaattacacctgtaatcccagcactttgggaggccgaggctggcggaccgcttagggccaggagttcaggaccagcctggccaacattgtgaaaccccatctctactaaaaacacaaaaatgagctgggcatggtggtgcacacctataatcccagctacccgggaggcggaggttgcagtgagccgagatcacgccactgcactccagccccggtgacagagcgggactctgtctcaaacacacacacacaaactagtggggtgtggtggcacatgcctataagtcccagctactcgagaggctgaggaagaaggatcgcttgagcccaggaggcagaggatgcagtgagctatgattggcctgtgcactccagcctgggggaccgtctctgagcaagaccctgtctcaaaataagtaaataaataaagcaaagcagaagcagaaaagctggaaggtaggctgagcccacactgatgacagcctgaacttaatttagtcaggagtggagagccactaaagactagaggaggccaggtgcggtggctcacacctgtaatcccagcactttgggaggctgaggcaggtggatcatttgagctcaggagttcaagactggcctgggcaacatggtgaaaccccgtttctactaaaaatacaaaaattagctgggtgcacacctgtaatcccagcactttgggaggctgaggcaggtggatcatttgagctcaggagttcaagactggcctgggcaacatggtgaaaccccgtctctactaaaaatacaaaaattagcgggtgcacacctgtaatcccagctactcaggaggctgaggcaggagaatcacttgaacccaggaggtagaggttgcagtgagctgagatcatgccactgcccttcagcctaggcaacagagcaagactcttgtctccaaaaataaaaaataaagactaaaaagactggaagaggccaggtgcagtggctcccacctgtaatcccagcactttgagaggccgagatgggcagatcacgaggtcaggagattgagaccatcctggctaacagggtgaaaccccatctctactaaaaatacaaaaaattaaccgggcatggtggcacgcacctgtaatcccagctactcgggaggctgaggcaggagaatcgcttgaacccaggaggcggaggttgcagtgagccaagatcacaccactgcactccagactgggccacagagcaagactccacctaaaaaaaaaaaaaaagactggaggaaacaagtcaagcaatacattaggaaaatccacttagcattcatcttcaagaaggtctagcattggggtggactaaggcaggaagcccagttaggaaaaggtttcaataatccagtacaggttgccatggaatacgagggaagaagtgattcgaaggaagtaatcttaaaatttagctcgctggatggcagagaacttagaacagaatgtcaaagaccactacagtttcactacctgaattttgatattttgcctcaagatcttcttttgaggaggggaggcagtgaatcagaaagagaaatgaaagcctttaaaacattaatggagtctgcagacaactttctgttatcgaaaaaataacaagccgggcgctgtggctcacacttgtaatcccagcactttgggaagccaaggtgggcagatcatctgaggtcacagacaggcagatcacctgaggtcaggagttggagaccaccctggccgacatggtgaaaccctgtctctactaaaaatacaaaaattagccaggcgtggtggcacacgtctgtaatcccagctacttgggaggctgagacaggagaattgcttgaacccaagaggcagaggtggcagtgaaccaagattgcgccactgcactccagcttgggcaacagatcaagactctgtctcaaaaataaaataacaggccgggcacggtggctcacgcttgtaatcccagccctttgggaggccaaggcgggcggatcatctgaggttgggagttcgagaccagcctgaccaatatggagaaaccccatctctaccaaaaatacaaaattagccaggtgtggtggcgcatgcctgtgatcccagctactcgggaggctgaggcaggagaatcgcttgaacctgggaggcggaggttgccgtgagctgagatcctgccactgcactccagccttggcaacaagagcaaaactctgtctcaaaaaaaacagcaggcagagacaggggaggataacgagcccagccaggggttcaagacctgcttgggcaatatagcgagatcccattctccaaaaataaattaataaaaaataaataactggctgagcacggtggctgacatctgtaatcccaacattttgggaggccgaggtgggcagatcacttgaattcaggagtttgagaccagcctggccaacatggtgaaaccccgtctccactaaaaatataaaaattagctgagtgtggtagtgggtgcctataatcagctactcaggaggctgaggcaggagaatcatttgaacctgggaggtggaagctgcagtgagctgagatcgcgccactgcaatccagcctgagtgacagactctgtctttaaataaataaataaaataaataaccgaaaatgtagttataataaaagtatacaattaaagcatttcctttaggccaatccaacctttaatgggcactgggctgattcagatggttggtgcagagaatgtgaatgaataaagtcacaccctccaataaaggccctgccatgatttgaccacagttcctcctttgtgtgtctgtttctccctcctccctccccacttgggttgtaatctcatctcgggatgctgttttagtcatgcttatggcctcagcacttcacacttcactgtgttcaacggacctgtcccaacttttggggagttcccaatgccatgaagtatggctggaacacagcatgaggtcagaaccagactgtgagggatttcaaacgctaagaggaagattttggactttatcctgcccagagaccacagatggctattaaaggaagtggtttttttgtttgtttgtttgtttgttttgctttttgagacaggattccactcttgtcacccaggctggagggcagtggcgtgatcatggctcacagcagcctcgacctcctgggctcaagcaatcctcccatctccacctcccgagtagctgggacgacagatgtgtacccagctaatttttgtatttttaatagagacagggtttcgccatgttgcccaggctggtctgaaatgccagacctcaagtaacctggttgcctcagcctccccaagtgctgggattacaggcatgagccaccgtgcccagcctaaagtattttagaataagcacactgcagggtggaatctgggttagagaaaatggtcagggagaccagtggagaaatgtaatgattccactgtggcaatggaaatggaagaatgcaattcaagagctatttgtttttttattttttatttttgagacagagtcttgctctgtcacccaggctggagtgcagtggtgcaatcttggctcattgcaacctccgcctcccggattcaagccattctcctgcatcagcctcctgagtagctggaattacagatgcccaccacacccggctaatttttttaatttttaggaaaaacggggttttaccatgttacccaggctggtctcaaatttctaactcaggtgatccacccacctcggcctcccaaagtgctgggattacaggcatgagccaccgcgcccggccctcaagagctatttagaacctccttaaaaaccagaatgtgacggatgagagatgaaaggcagatgtcaaagacagcttaagtttcactcctaaggaaaatcaggacaagccagtctgggtattggctgatgggttcagttgtgaacatgctgagctaggagtatctgacaaatccaaagggagatgtcctgaacgcaggtggatgtgaagagatggctgggctaaggataaaacactgagaatggtcagcatggattaggagcccccagaaagtgagaacagagacagaacaacgaggaccacaaacactaagggacaggcagaacccacccctcccccacctcaaaaagacttcaatggggtctgaggaaaaaacaaacaaacaaagaaggggaggcagaggcagaggtggtagggagaagaaaccagcaaataaaatagggacagggccgggcacagtggcttatgcctgtgatcccagcactttgaggggatcacttgatgtcaggagttcaagaccagcctggccaacatggtgaaaccctgtctctactaaaaataacaaaaattagccgagcgtggtggcacgtgcctgtaatcccagatactcgggaggctgaggcagaagaatcgcttgaacccggcgggcagaggttgcagtgagccgagatcatgccactttactccggcctgggtgaaagagcgagactccatctcaaaaaaaaaaaaaagggggataggggccaagcgtggtggctcacacctgtaatcccagcactttgggaggccgaagtgggcagatcacctgagctcaggagttcgagaccagcctggccaatgtggtgaaatcccatctctactaaaaatacaaaaattagccagatgtggtggtgggcccctgtaatcccagctacttaggaggctgagacaggagaatcactggaacccgggaggcagaggttgcagtgagctgagatcgtgccactgcactccggcctaggcaacaaagagtgaaactccatctcaaaaaaaaaaataataatggtatagggccaggcatggtggctcatacctgtgatcccagctttttgggaggtggaggctggaggatctcttgagcccaggagtttgagaccagcctgggcaacatagggagaccccatttctacaaaaaataaaaaaattagcctgccatagtagcgtgcagatgtagtcccagctacttgggaggctgaggtgggaggatggcttgagcccaggaattccagaccagcctgggtaacatagcaagaccccatctctacaaaaaataaaaattagccatgcgtggtggtgcatgccagtagttccagctactctggaggctgaggtgggagaatcactggagcctgggaggcggaggttgcagtgagtgaaatcacaccattgctctccagcctgggccacagaacaagaccctgtctcaaaaataagtaaataaatgaggataataccaagaaaaaagaatattcagaggtgatcaagactatcaaataccacagaggctgaggcctgtaggtggtcaatgcctctggttgaagcttttttaaccagagctagattagcagaagaatgagctgaagtggaagggaggaggaaaggctgggccctccttccacagatccttaagtaagcctcaaggccccggaggccccagagtgacctagaacagactggaccatctctaagaagcagggagccctagtgatcaaactgcggcctgggaagcttggcactctgagttcagataccaaattcccacttttaagcaggaagggggaaaagtcacttaacctcctctggcttcagttttctcaccattaaacaggaaaaaaacaataacatcgttttgctgggctggtactgggattaaaattttaagagtcaggggccgggtgcaggggctcacgcctgtaatcccagtactttgggaggtggaggcaggcggatcacgaggtcaggagttcgagaccagcctggccaacacagtgaaaccccatctctactaaaaatacaaaaaaatacaccacaccaggcgtggtggtgggtgcctggaatccaagctacttgggaggctgaggcaggagaatcgcctgaacccgggaggcagaggttgcagtgagccaagatcgcgccattgcactccagccctggtgaccgtgagagactccatctcagaaaaaaaaaaaagtcagggtcttgctccgtcgcccaggctggagtgcaatggtgcgatcacagctcactgctgccttgacctcctgggctcaagggatcctcccaccttagcctcctgagtagctgggactacaagcatacaccaccatacctggctaattttttaaaaaaattttttgttttttgagatggagccttgctctgtcacccaggctggaatgcagtgacacaatctcggctcactgcaacctccgcctcccagattcaagcaattctggtgcctcagccgcctgagtagctgggactacaggcgcacatgaccacacctgcctagtttctgtatttttagcagagatggtgttttaccatgttggccaggctggtctggaactcctgacctcaggtgatccacctgccttggcctcccaaagtgctgggattacaggtgtgaaccacctcgcctggccaaaaaacttttttttttttgcagagatggaggtcttgctatgttgcccaggctggtctccacctcctggcctccaatgaacctccacctcagcctcccaaagtgctgggattacaagcgtgcaccatgacgcccagctaattttatttgttgtagagatggggatctccctatcttgtccgggctggtcttgacctcctaagctcaagcaatcctcctgcctcccaaagtgctgactcccaaagtgctgggattacaggcctgagccaccacacccagctgcaagcccgattttccaaatgtatctctcctctgtttttctctttctttttttttttttttttttttttgagacgtagtctcattctgtcgcccagactggagtgcagtggcgcgatctcggttcactgcaggctccgcctcccgggttcacaccattctcctgcctcagcctcccgagtagctgggactacaggcgcccgccactactcccgggtaattttttgtgtttttagtagagacggggtttcaccgcgttagccaggatggtctcgatctcctgacctcctgatccgcccgcctcggcctcccaaagtgcgggattacaggcctgagccaccgcgcccagcctttttttcttttgatagggtcttgctctgtcgcccaggccgaattgcagtggggcgatcacggcttactgcaccctcaacctcctggcttcccaaagcactgggatcacagacgggagccaacgccccggccagttttttcaacgttgagagccctggcccctagataggacccagcatcctcactgctctaacccctccccccccaccatccccgggctggcccggacaacccctaaggtggccgagggcgggccctgaggaggccggcgcgcgcttccgggcacagcttgtggcggtgaagccgctcagatggcggaggccttgggtatctctaagcagatcgctaggccgcagacctcggagctcgtcttgggtcacttttatttattttttttgagacggagtctctctctgtcgcccacgctgcagtgcaatggcgcgatctcggctcactgcaagctccgcctcccagattcaagcaattctctgcctcagcctcccgagtggctgggattacaggcgcccgccaccacgcccggctaatttttgtatttttagtagaaacggggtttcaccatcttggccaggctggtcttgaactcctgacctcgtgatccacgcgcctcggcttcccaaagtgtgggaattaaaggcgtgaaccaccgcgtccggcttgggtcacttttcgagtatacagctcctcctctctccttcctccctaggcccccactgccccgactcgcaggccgcagacaaggctgagagcgctaccttgctttcccgcgctcgcctcggtgcctactgcgcctgcgcgagctgtgagggcgggacccagagacacccgccccaactactggcgtgcgccctctgctgtcgcctaacggaactccgggcgcgcgtgcgcacgcaccccaagccacgccccgccaggctgccggcgcgcgagcggttggcgccgctccctgccttccctctcctacagtggggcggggccgggccgcccgagtcgggggtggaaggcgggggccacataatgccacgcccccgcctcgtccccatttgaagccccgcgactcttcactgctggtcaatcagagcccgtgctctccctagtgccggccaatgggaggtgcgctcgggctgcttccggctccgcgctccgctcgccccctcccaaggtctccccgcgactggcgggacgcaggggcgggcgtcggccgcggtgacgcgcagcgggcctggagccaataaggggcgggctcggtgctgatggacggtgctggtggccagtggagaggcgctggccgcacttcccgtcggggagagagtgtaatatggcgaagacctacgattacctgttcaagctgctgctgatcggggactcgggggtggggaagacctgtgtcctgttccgcttctccgaggacgccttcaactccacttttatctccaccataggtaacgggaccggggaatggctgggggcgccggaggcccgggctgggcgcgcccctgaggggctggggctgagggatctacagggctggacgggccgagggcgctgagagggtcgagggggcctaaagggagaagagcagtcgcctgcaccgccgttcgggggttcctgggccgtggtgggggagaccaggtgcccattttgcagatagggagactgaggctccgaccctcagcccgctcgttagggcgtgttatgtcttgggctggggtcttcgcgcccgtcctctcgatctgtcctagcagcagccctcgaagcggttcttttgaggctcttgccttacagaagtggaaactgagtcatggggaattggccatgggaaaaagacagtggcatctcaccttaatgagcatttactatgtgccaagtgcttcacgtgcattttcacactcttcagttcttggtgttaagtgctgttatgagcccgtctgacaagatgaggaatctgaggctcagggagggcatggaacttgcccaaggccacacagtctgcacgtggtgagaatgggatttgatggaatttgaacctggctgtgtctcaacccaaaactcgaggcttagctctcctagagagatgccactgcacactcccagctgatgacaagctcagctaatgcaccttggagccgggactctaacccacaccattcctgctcttttctctggagcgttcagaggttgagcccctctccctgaccatgcttcccctcataagcgtattttcctctagaaggaatgataagaagagtcaggaccttttccctgcccacctttcatcctgctccaggaatgacagcaatggcaagtgacagcactgcctgccctgggacctgtcatccccaagaagatgcaagataaaagcctcagcgagaaactaaatcagccactgccacagacagccttgacttccctatcaaagggcccaagactccagctgtcactttagaacagcttttcctgtagggccagcccacattgtggttgaacagaattggcttggtgcatctcagttgtgatgtccacagaagtggagctgacctctctcagtgccacaaaagcagtcctggcccacaatgaaaaggtttgacccaggagtaacacctatttgagtggcttgtgagctctgtagccctgctagggatggggaaagtgggggaacggtcactaagtccaggagtttattccgactcaagaaaacctagggaatggcctttgctttactgtgtcactttgacagaatcgtgttatctccctgaaccccaagataatgtgctaattccattcttgccctcctccaggagctatgctttatttattttattttattttattttttgagacggagtctagctcttttgcccaggctggaatccagcggcaggatctcgggtcactacaacctctgcctcccgggttcaagcaattctcctgcctcagcctccctagtagctgggattataggcacccgccaccacgtccagctaatttttgtatttttagtaaatacagggtttcactgtgttggtcaggctggtctcgaactcctgaccttgtgatctgcctgccttggcatcccaaagtgctgggattacaagcatgagccaccgcacccagcggagctgtgctttataaaacagttatatgccagatgtaaaatagagagaattgactggaaatcattacgtctggtttccagttgctgtttgcccttgaatgtgcactacccctctctgagccctgctgtctttagagcaggagtgacactgtctgcccagcctagtgccctggtggttgaggattagaattagacaataaggggttgtcaccacaaccagaggctatctagaggaagcaaatgaatggctcctgcagtgacagcatccagcctctgaagacagatgtttctgaattcttccccctcccccactccaaggctaaactttagggtaattcttgtgctccaaccaatcaagaagtggcgttaattcagcctgggcaacatggcaaaccccatctctacaaaaaataaaataaaatcagccgggcacagtggctcacccatgtagacccagccacttgggaggccaaggtgggaggatcgattgagcccaggaggtcaaggtgcagtgagctgtgatggtgtcactgcactccagcctgggcaacagagcgagaccctgtcttaaaaaataataataaaaataaaagaaagaaagaaatgatgttaactgtgagcagactggcttgcattcactcagatcccagtttcccagccttccccacaaacccccctctttttttttttttttttttgagacagtctctctttgtcacccagtctggagtgcagtggcgcgatctcggctcactgcaacttccacctcccaggttccagcgattctcctgtctcagcctcccaagtagctgggattacaagcacctgccaccatgcccagctaatttttgtatttttttttttttttttttagtagagatggggtttcaccatgttggccaggctggtctcgaactcctgacctcgtgaccgcccaccttggcctcccaaagtgctgggattacaagcatgagccaccgcgcccagcccaacccccctctttagagttactttgagctttaaagaggctttcttccatttgcagatgaggatgtgacttggtgaaagttacctagcaaggtggaggtggcacctgaccctaagatccctccctcccaccccttcattcccctccttccatttgtagccttctgtcttctaggaaagtctaattcaccatgaccttgaaggtcagacctcataattcttaggcctcataaagtttacacttcctaattaaatttggcatgttaataaaacccagaggagtgtagggcggagtgctgctgtggagcttggccaacctaacagtgctcctcgattttttgtgtccctgtacacgtgtgacaggaaatggggaatgttttaggaagcccaggcacactgggctgtctagtcctgaagcagtatcaccttaatgcttaaaggtgattccataaattagccatacgtggtggcgcttgcctgtattcccagctactcaggaggctgaggcaggagaatcgcttgaatccaggaggcagaggttgcagtgagccaagattgtgccagtgcactccagcctgggcaacagagcaaaactctgtctccaaaaaaaaaaagaagcaattctatattggctgagtgtacctctgggttttctttatagacaaggattgagtggctattcattttctgccactcaatccttaacattttgccaaaagttacatttcatcaaagcctattctcagaagccccatagatcatttgtggtgtgaacttggccctgtagctccctggaatgggttctcaccagcctggctcggcgccactgcctcctcaggggcccattgattcctccagtgaaagggttggcatttgagaaagtgctttgtgaaccgctcaacaccgcgtagaccctgttgcgctttaatactttgatccagccatattttgccagtgtcttctgtgggccaggcagccattttggcaagagggctgcagaaaggacacaggtgagtcaaggtgcgtgcaggactggggtaccagcttctagcaaatgtgtattcaacccctgtgtgttcagtcactggaggtaatagcagtggatgagacttgtcagttccctgccccagggagcttacgtttgagagggcgaaagtccagtgctggggctggatggatggaattagcatccccaccctgggttcagagaggcccagccaggcctgggcctcaagtcttccccagcaggcacttgaacaaactcctggtggcaaaggctgggtctggctgtttctcatctacatgggccattatgatctgcaagcattatgcccaggtccatgcagcagatacatacatgtatgtcagttatgttaataaataggtaaagggagaactgatgaggatggtcagaaaggttcccctgaggagggaacttgaatgggaacctgaacaaagggatagccaggtagctacagaagaaagaactttccagggcagggaagagcaaacatcaaagccccgagtcaggagcatgcttggaatgttgaggaaatcgctgtgtggatggtgtggccagagagagcaggtcatgagccagagtgctgagaggtgaccaggttaggcaggaccttgacacacatgagcagctgtttccactttattcgagggaagtggggcagggaagccactgaaagaggctttaaaaaaaaatagctttatgagatagaattcgcatacagttcacccatttgcagtgtacaattcagtggctttgggtacattcacagagttccacaaccatcaccacaggcaatttgggaacatttttattatgccaaaaagacaccaacccaaggccaggcacgcacggtggcacagtggctcacgcctgtaatcccagtactttgggaggctgaggtgggcagatcacgaggtcaagagatcgagaacagcctggccaacatggtgaaaccctgtctctactaaaaatagaaaaattagctgggcatggtggcgcgtgccggcagtcccagctacttgggaggctgtggcaggagaatcacttgaacccgggaggcagaggttgcagtgagccaagattgcaccactgcactccaggctagccaagatcgcaccactgcactccaggctagccaagatcgcaccactgcactccagcctggtgacagagaaactccatctcaaaaaaaaaaaaaaaaaggataccaacccttccagtttccccatgtgcccccccagccccagacaactgctaatcagctttctgtttctatgaatgagcctatgctggacatgtctgttaatggaatctcacactaagtgacctttagtgtctggcttctctcagcatcctgtcttcaaggttcatccacattgtatagcatggatgagtactccgttcctttttatgactgggtcatattctgttgtatggttggaccacattttgttcatccattcatctgttggtggacatactagaaagtttggagcagagggccgggtgcggtggctgatgcctataatcccagcactttgggaggctgaggcaggcagatcatttgaggtcaggagtttgagaccagcctggccaacacggtgaaaccccatctctactaaaaactcaaaaattggccgggcattgtggcaggcacctgtggtcccagctactcgggaggctgaggcaggagaatcacttgaacctgggagacagaggctgcagtgagccaagattgtgccactgcactccagcctgggcgacagagcgagactccatctcaaaaaaaaaaaaagaaagtaagtttggagcagaggttagctgtgtaacatggttagggttatatttttgaaggctggggaggggactgcgggtgaacagtgggagcctggggaacatcaaggtggctgcgaggtcaccgtggggaaaggggatgaaagcgggaggtgagagacaaggaagatggggtcaggaaggcttgttaggaggtgatcttcaagggggccttaaaggaggagaagtgtgcctagctgacgggccagtgggacacagaccacccgcagaaaatgaatagcatgtacaaaagctgggggcaggagagaacgtgaccatgtgcattgacgcatggtggggcctaaggccctgtgtgcctgggggttggtcagctgcagggtgttggggagcaagggactcaggcctgcagagggctctgttgagacccactccgtacaactgcctggggtggggaggcgggttcagctggcagcaagggacaagagcagggctttgccacccgcgccccctgggtttgctctgcactgctcccatcagctcttggagagggaaaatatctccaagtgtttccagatctggatattccgacatcctgcatgcccagcaccaggcagggtctccgtaagccacaacagctgtcacctgcacaggttggtggcgcccagctcagacacaacttgggaaatgggctgacagtgacgtgccttttttcttttttctttcaggaattgactttaaaattaggaccatagagctcgatggcaagagaattaaactgcagatatggtaagagtcattgttctctgtcattctctccacctggcaatggcttcaagccagaagcccttggccttctccctccaccgtccctgtgaccttggcctccatttcttggtgcccagtcctggcacatggggctttctccagaagctcctggaggtttatacccagcccagagagctgtcctctgctggctgcagggcaccagggcctacagcatcataggcacaaagctgcccagccctggctagctcagtgttccacagtgggcaccatctgggtctggccttcagagtgggctgcttctgttgaacgggaagagagccctctcagtgccaggtgctggtgacgcctgcagggactgtgagatgccccagccgagagtttccttttgagcctctcaacccactcagaagcataaaggtccaacttcacttcctcttttctcccctggggcaggcctggcctcccttcctagcgtacagaccgaaaccccaaaccgaaattaagcggagggccgggccccatgttgagacctgtttccattcctgagaactaagggtgacttcccatgcacatacaattagggaagtggggagactccaagtcgccatcgctggcctgattctagtttgctgagactgagttcaggtggcgggtatagtggggtcctgccctgcacacatgccactcgcacagagtcactggccctgagcaaaacaaagagaagtcacatttaagagcatggtgcaatttccctgtcacccaaaccaggcaagtgcctttgagtgggagcagtgtgccaggagatgggccacgaagtcatcctccctcaagtctcaaagtttgaccggtcacccccacttgccagtttcagggagccccacagctacccttgactccaggtgctattcacctcttctttttttttcttctttttttgagacggagtttcgctcttgtcgcctaggctggagtgcaatggcgcgatcttgtctcaccgcaacctctgccccccgggttcaagtgattctcctgcctcagcctcccaagtagctggtattacaggcatgcaccaccacgcccaactaattttgtatttttagtagagacggggtttctccatgttggtcaggctggtctccaactcccgacctcaggtgacccacccacctcggcctcccaaagtgctgggattataggcgtgagccaccacgcccggccctactgttcacctcttaatctgactttgggagtcgggtaggtttaacttgcagttcatcctgcagacattggtagtaagtcaagctctggctgccttgtaagttccaagccatggaagtttctccacttccagcacgttggtgccatgtcaccctttgttcccaagtccaaagtgacactgcatcagcaagcagaagtttcactttcctcctgccttcctgcttctgctcttagcaatcgtggtgaggttagtgactcaaaactcttctaaggactgtagttgaaaaaaaaatgactggtttttttttttgtttctttgtttttttgagacagagttttgctcttgttgcccaggctggagtgcagtggcacgattttggctcactgcaacctccgcctcctgggttcaggcaattcttctgcctcggcctcccaagtagctgggattacaggtgcctgccaccacgctcggctaattttgtatttttagtagagacggggtttcgccatgttggccaggttggcttcgaacccctgaattcaggtgatccacccgcctcggcctcccaaagtgctggaattacaggcgtgagccaccgcacctggcaaaaatgactgtttttaaccactcatgtctcctgctgctggtgtcagaaagtcagcttagctccaagcaaggtgtttctgcacaatccagacgtatagagccctccgggtcccagcagggccgtgggaggaaccctgggcttggagacaaaagacctgagtcttgccctggctctgtcaccaatcagttaggtcacctttaatttttttttttttttttttgacaaagtctcactctgtcacccaggctggagtgcagtggcatgatctcagctcactgcaacctccacttccttggttcaagcaattctcgtgcttcagcttcccgagtagctgggattacaggcacctgccaccatgcctggctaacttttgtatttttagtagacagggtttcaccatgttggtcaggctgatctcaaactcctgacctcaggtgatctgctggcctcagcctcccaaagtgctgagattacgggagtgagccaacacgcctggcttttttttttttttttcctgagacagagtcttactctgtcacccatgctggaatatagcggcacgatctcaggtcactgcaacctccacctcccaggttcaagcgattgttgtgtctcggcctcctaagtagctgggactacagatccacgccatcatgcccgcctaatttttgtatttttagtagagatgaggtttcattgtgttggtcaggccggtctcgaactcctggcctcaggtgatccacccgcctcggcctcttaaagtgctgggattacagatgtaagccactgcaccaggccagttaggttaccttttttttttttgagacggagtcttgctctgtcacccaggctggagtacagtggtgcaatctcggctcactgcagcctccacctcctgggttccagcagttctcctgcctcagcctcccaggtagctgggattacaggcacgtgccaccatgcctggctaatttttgtattttttgtagggacggggtttcaccaagttggccaggctggtctcaacctcctgacctcaggtggtccacctgcctcggcctcccaaagtgctaggattacagatgtgagccactgcgcccggccagttaggttacctacctttaaaccaaacactaagtacccttcaagccaggagctggactgggcatgggtatgtcttacccaggcatcacctcccgggcaataggccctgtgttccttgtcatgcagatgaggagggactttccccatcattcaaaccaagatggcaggcctgaaagcttttcctgagtcccagccaccctcaacagcaagagctatgttcctgagccacatgactggctcttctgtgaaccagaaactccagggagaattccctggaagcaaaggtgcagaagaggagaaggcgcatgggtcagggatcccatcatggctctgccacatcaaatgacccctccaggccacagtgtccttccctgtaataatagggagattagaaggtgctgccttagcagaagaaggtatcacagtggctgaacggtgagaaagccaggcatcccgggtagatgctccttgtctcctactgaggacagttattttcctttaatgttgctaatatcccttctcttcatgtttagggacacagccggtcaggaacggtttcggacgatcacaacggcctactacaggggtgcaatggtagggactttttgtttggttgtttttatctgctttttaagtcaacatgggagcgtcactgtgcattggttaccgaagcctagatgtttctgtggagcccgtgccccaactcctcagggctccttggtcccaagttagtcttaggaacaggctttgtgccccggcctacccccatgtacatacctccccttctggctgcagagacaatgcaaggtttaaataaagtggaaacataattctttgggaatgaagaaagacacaggaagccggttcttccaggtgagctcagtgcagttaaagccggcatgccccgacttttaggagctgtcacatgacctgcatctgtctctgaaatttgctaccaaaagcttgaagatcttccaggagctgacctgccctgggctgtcggccgttatatccgtcacccaggcctgaggcgggatgacgtgatgggaagactcagtcatcatccctcaaaacatttctcaagcaccttctctgggccaggccttaactagatgcagaaggcggccagggatgggacgaggtcctgtgtcaggggccctgtgtgtacatggcagggcattcaggggtagagggagcaggaggtggagcccctggacctgacctgagaccctggcttgcccactgagctccatctcctgacttggaaaagggaacggagcacagcactgtgtctcgggctgtgctgaggataaacggctgcctctccccattcccaggtccctctgctccccactctttcctccgcataccccatcatttaattgctcaggcagctgcctgtttcctcgatgagggcagcgccacatcctggtccctgccatctgcctggccccggggaacctgctgggtctgcagtagttgctcaggaaagacttgtggagggtggagatggaaggaggcattatgtgtttagagcatcccacacggcatccgaaacctcatggcaacccactcgtgtgggctgcagccttagtgtgcctcagtaaaattaatgtatttctttccccccacctcacagttctctggtggagggtgggcaggcggcctgagggcactggggtcttggggagcttcagcctctggagaaaactgtgacctggggcctgtcccgatcttctctgggcccaaatagccaccttccaccctgccctgaccaccaagccctcccctgcaccaggcagtgggcccaggtcttagctcagattatctcattgcattttggctgtgaacctctttgtgcaggcgccattgtcatccctgttttataacaaagaacctgaggtttggcccggtggcctgccccgctgaagttcactcagcaggtaaatggctaggctgggctgggctgtttgtctctagcacccacatcctcaaccagcaccaagatgatcgtggctttccatcctcctagacccaggccaacctgaacagatgccaccactggctgcatgtggctatttgaatttacccaattaacattgaaaatccagccaggcgcagtggctgatgcctgtaatcccagcactttgggaggccgaggtgggtagatctcttgaggtcaggagttggagaccagcctggccacatggtaaaattccatctctactaaaaatacaaaaattagctgggcgtggtggcggatgcctgtaatcccagctactcaggagggtgaggcaggagaatcgcttaaacctgggagccggaggttgcggtgagccgaggttgcaccactgcactccagtctgggcagcagagcaagtatccgtcgcttaactacttaattaattaattaattttaaaaaacattgaaaatccagctccttgggtcaaagcagctatgtttctgatgccctagagccttgtgtagccagtatcagtcatatgggacagcaccaccattgcagctgtgtcctcatctctgtcagcatgctcatagacccttgggcctcaaaatcccaagtttgggaagcattggatgcctagagacccatggtgaggtttgcccagacggggccctggaaaatagtcacttggagccctgaggggtgtttccaggaaaacctggaataggatggctggctcagtgttttccaggtgcttctgcttgattctaagagagagctctacccactgccccactaacgtccaggttctcccctcagctccctgaaataggtataatccaggaatttgagtcttaggcacatgtcaccaacttagtggtgaaggcaggaatcctgggctttcagagggtccagtccccggataaagggccccacgccccctgtccctgaccatgtcacagtcacagggtgtgcccaccgtggatggggcatggcagacatcatgggccactgcagccttgaggttcttcgccatggttgcggctgactgtgaggccattattcatgtccctgaattcccaggaggatttggggttgcagtgactttcttgccccatctgtgtcgtttttgtcccacactcttgcacccacatctgtctcaccattaccacatggcccgtgtccttattctgcaaacttggatggccccagacaacttggccagcagcagaagtcatcagtgccctcaggtgccacagatgcagggctgggcctggggagcaggtagcgaggaggaaggaagaaatccaggcctggccatgagcaggccacgtgccttggagcccaggatgcccggcaacaaagggggacttgtgatggcactgcaggctggcccgctgtgggcactccacaaggacatcgagaaccacacagaccgtcagagggtggcccccacatgtgggttctggggctgaaaaaggcccagggatattgctgagaggataggtgtcatcagtgcttttggagttagcccccccccgccccccgtgcttgaatcttaaaggtcacgtctctgtgcctcagtttccccttgcatcgcatgggcatgtttgcgcttgtccacagcagtagcgaggctgtggacccaggctgaggcggggctgccccgaagctcttccaggacccacgagccgtctcccagttgctcacgtctaggttagggaactggaagggccttggcactctcggctccatcttcacacagccggttccctctgtggtggggtcactggaagttgtgtggatgtcgggtcaggacttcctgggctcagttgtgcctggtaggtggctcaggcagagcgtggggtgagcaaggggtgaagaggaggccgattgcaggggagggtcagcgtgaggggagtgctgctggcagtgggcctgtggaccggctcccaccgtcaggctgcaccaccccgtgggccatgaggggagccagccgggcttgtcagcgagtgcgtggcaggggctggcctgtgaggcagaagggtcacctcagcggcccggggggcaggacaaggctggtgccagaacccagcagaaagaagggccacagggatggagaggagggggctggcttccggggctccacagaggtggggagggcggcagctaatgggcctggctgtgcagtgggtgctgggctccccaccactgttctctggtgccgctgaggcctcccttccagagcctgcagccgatcaggcacctgtgtcttctctccccgcgcagggcatcatgctggtctacgacatcaccaacgagaagtccttcgacaacatccggaactggattcgcaacattgaggaggtgaggccctccggctcctcccactgtccctgcttcagtccttgtcccagagccctctggtttactcatgagaaggccaaggtgcagagacacatacaggccacttgcccacagcctcctagtcagggacatggtgggagcagggactgagatgcaagcagccggccccagggaccacacactggcctggccccaccccggagcccctcggagcccatccctccagctaggctgttggatctggccagtgtcatggttataagagaaaggatatccaagcttgtggtcaccatgagtgttgggtgctttctagagaaggaagggtctagcacaggtgtgacccttgtagttggagggtgtggtgagcaggcgtcagttgtactttgagctatatcggagcagggtgtgacctggtacaaacgacctgtgttcagaccttgaaccatagagcagtgagaagtaggccaacccctcctcccctcccaaagccagcatcttcatcttctgctccccaaagagctgacctcacccccaaagccttcctggctgccggcacctgcagctttctataactaaccatgtggggcttcaggtctgaggcacagccagagaacttttcccatctataaaaccacagcaaaagggcatatcactgtccacccaggactcatggacctcccaggccaggccgagaggccaccccatcatttgtgagtcattgcactgggctcacctccccagtgaccctgagagggctgtgctgccaaatttgccagtgcagggctgcaccccagctgggaaagctgtcttcatccgtggagaggaggagagcctggtctttgtgaaaggtctctgtttctggccagcgggcaggagccaccttctggttcatgggaagtgaggcagggagtggcgcagtaggttccagagaccaagtctgagctggtggaagaagacagcagtttccagtgtccccgtcctccaggaagcgtggtccgctccatggggacccagggagacttgacgaaggagctgcctttgggtatgagggcagagtttgggcaacatcagacagggtggtgaagtgcctgcagctggtgacggcctcgagttgcgaccacctcaggcacggcctgtttctggagcccaaaaatagttgaaatgtcagggccaggcgaggtggcttatgcctgtaatcccagcagtttgggaggctgaggcgggcagatcacctgaggtcagaagtttgagaccagcctagccaacatggcgaaactctgtctctactaaaaatacaaaaaattagcctggtatggtggcagatgcctgtaatctcagctattcgggaggttgaggatcgcttgaacctgaaggcagaggttgcagtgagccgagatcatgccactacactccagcctgggagacagaacgagactccatctcaaaaaaaaacaaaaaaaaaagtgtcaaagcagaaggtcccaggacaacagctggggcctcttgcagaggagccagggagggaaggaggaaagccaaggtcggggggtaaatatctcagcctcactcacctcccataggctagacccgcccagcatcccaggtgcgggggcttgattgatacagccatagaagctgccagaaagcatttcagaaaatgtgcatttgctcagagtagcagctagaaccctggccccagccctggcattggctgtgtgacatggggccggctgcttggcctctctgagcttcagcttgtcccttagaccaggctgtacctagcagtcctgaccccaccgctctgatttctggggacagactgtgtgttggcagaggcacctggcctgtgtcatccggtctgatcccccgtctgtccccctccctctcagcacgcctctgcagacgtcgaaaagatgatactcgggaacaagtgtgatgtgaatgacaagagacaagtttccaaggaacggggagaaaaggtgggcatggtggcacaaggggcagagggcctcggggtcttggggttcttgtgcagaggccttcccctgtccctcctctgccccaggggcctgagacgagttggtcaccccagtggggcacgtgccatgggatgacagaagcacacacccagccggggcttcttgggtgcactctgcgggcatctcatcaaaacctaccatggccccgctccagactttcaagaccacaggagcggggaacagagccatagtttgatcccagcaggtccccgccaccctcccatctcagctgccatccccagcaactccatgccctgtgaggccctgtggaggggcattcactatagaattgagggagtgatccaggaagtcacgcccacagccccagccctgttgctgctccctcttggcgccggccctgccttcagctcctgttttaggcaagctcagatgcgcccggcggctggtgtgctcatgcgtgtgcctccctctctcacagctggccctcgactatggaatcaagttcatggagaccagcgcgaaggccaacatcaatgtggaaaatgtgagtcccgggccctgctgggagacatggggcctgcaggatcggccccttcaggctaaagggggagctggcgtcctccgaggaggtcctgccagacggaccagcctcgggctcagggctgccagtcagtcctctgagggacatttcctgggcagtgccacgtgccaagcacaggcagcccctgggaatgtgccatcagcagggacaggcaccacaaagggcacctaggacgcatctcacgggctcttgggcagccctggggaataggcacggttttacaggtgaggaaactaaggctcagaaagacccagctctgtgtttaccctctcagccacaccactcaccctggagaggcccctgtcaaaaaagcccagacatagcagggagccctgatgggacctgggcccatgccaccctcccctctccacggggcgaccccagccctgcggccgatcctgtgatgtttccccatcctagtcatgtttccaaggcggatcttccatatcactcccgacctaaagtctctatgctgacgtgaagacaaaggctagactccttgcctggcgtggaaggccctccctcaccggctacagctggtgtttgccacccagggctcaggccttgccctccccaggccacctgggctgctcccttctccaatacgtcactgcatttccctcctgtgtgcccctttttctgcctgccaggttcccttttctagtcagggcctggccctgggggcctctccccaagaacaccttcagtctcccctgggccttcctccgcaccccaagccactctcctctccagaacctcccacatcatggggatgtatgttgggatcacgcctcccgccatctctgtatgtcccctcctcaaggctgtgacagcagctcaacccttggctgtgctgggagatgaacctgctcccgctcccagccctgccaggcaaggactccgagtgaagcttgtttggccacagagctgcttgcctttttccctgaccatcagaagggaggccagagctgacagaacctaggagtcagagacaaagaactgggcactcctagatccttctggattggtcggttaactgctgggttcctttggacaagtcacttggcctctctgagcctcagtttcctctctggccaactgagtgtcgccccatctcacagggcttaggggaggtggcacatgcgtaaagtcccgtcaatgctaaggtgctctgcggaagtgagagttgatgtcagagagtaagggtgggtgggaggcagagggagccggggaaggatgagctggggccggacaggccagatgaacccactgccagaggcgggcatcaaagggccaaatgggaggcccacgcctgggaagctgtctcaccacacccgctgtacacgggcggctgaggactcagggtcctgccatcccaaggactcacaatgtgcttattccacaggcatttttcactctcgccagagatatcaaagcaaaaatggacaaaaaattggtgagtgtgtgtccttccgagatccccgggtggatctctgggatccagccatcgtcgttagcagcagtgatatgacgtgccctagatcctgctttttagggcccagccagaccccatgggacattgctgggaaagggggaagagtttgcaggtgtggctggggcatcagcatcaggcagtgccagcctggggacgctgcccaagcagacaaggccgtgcccggtgaatccccaggctagcagggagcacacggccttttccattccactcaagggccagaaagacaacatggtgtgcaaggacagagagccatggctcggagaaaagcttcctaggtcgcttgggcagggccagggctggtgtctgataactgctggctcatcgtcttgacaagcatggcagatcaagaacctgcccccgctccaccccagccccagatgctacaagttgtgacagctctgcaaccttcattgtgtcccagggttctctgaggcctccagggaagtctgcatgaatccctacccatctaccctctcattcgtttcttgcttttttttttttaccacgttagcgatttcctagtccgctgcgctcagtatcaatggtgctttcttgatggaatcaaacacttccctgtactttgggggcatttagtgcctaaacaccgtagtgacccttcctccctcgccctggttccagcaactgccctttcccggccatgttacattggttgtccaatcgaggagcacacggcgctctatttgtgggttaagtctggtcacttgagaatgcacataaaatacaaaatgccgttcaagttttacatctgatgtaagcaaatctgttttgtaattctaagatgcggtgtgttgaacagtgaggcatgtgattgatttaatagcagctctttggccattaaattaaaatgggaaacagttcatggaaaccagtgcactgaccaacaataatttgggattttcttgcaattttttttcttcagtataatggtcaaggtctgattcttttttcttttagttttcttattagttaaaaaagagattttttttttagagtctcactttgccacctaggctggagtgcagtggcaccatcacagctcactgcagccttcaactcctgggctcaagcaatcctcccacctccgcctcccaagtagctggggctataagcacacaccaccatgcctggctaattttttttctttttctttttttttgagaaggagtctcgctctgttgcccaggctagagtgcaatggtgcaatccctgctcactgcaacctctgcctcccaggttcaagcggttcttctgactcaacctcccgagtacttgggattacaggcacatgtcaccacgcccagctaatttttgtatttttagtagagacgaggcttcaccatgttggtcaggctggtcttgaactcctgacctcaggtgatccacctgcctcggcctcccaaagtgttgggattacaggtgtgggccaccccgcctggccattttttcttttttaagaggcaggatctcacttgttacccaggctggactcaaactcctgggctcaagcagttcttctgcctcagcctcccaaagtgctgggaagggtatgatggggtgggcagataagtgagagagtggttggaaggggtggtatatagcagatggaaaatagatctgtttctgaaaaacgaattatcagttgtaagagaattggatggatgggtagaagataatggatggatggttggttgaaagggaataaatcgatggttgatttgttggaaggagatggttggatagatagatgattggtttgttggttggttggaaggggatggatgaatggttggttggaaggaggtggttgcttggaaggggatggatggatggttgattggtcagaaggggtggttagaaggagatggttagttggaagagggtggatggggggaaggagatggatgggtggatggatggttggaaagggatggatggatggttggttggatgaggtggttagaaggggatggatggttggttggttggttggaaggggatggatggttggaagaagatggatggttggaaagggatggatgagtggatggttcttggttggaagggatggatggttggttgattggtttgttggttggaagcaggtggatagacggatggaagggaatgggtgagtggatggatggatggttgaaagggtatagatggatggttggttggttggttggttggttggttggttggttggttggttggatggttggaaggggacagctggacggactggcagatgatggatggatggtttgatggctgattggttggttggatggctggaatggtaatggatggatgacctggcagatgatggatggatggttggatggctcgttggttagttggttggtttggctggtttgattggtttggttgtttggttggttggttggttggttggttggatggttggatggatggttaggtggatggttaggtggatggctggttgattgtgagacgtagtgctgattctcagtgataacctcagaaaacctcttgtgatttcaggaaggcaacagcccccaggggagcaaccagggagtcaaaatcacaccggaccagcagaagaggagcagctttttccgatgtgttcttctgtgaggaacaccgccttactctgagcctcgctcagcccagctgactgtgcctgttctgagtgagcccctcactcagccggggccctcccacctccaacgccccgcccacgccgcggccaccgggcccacggccaccagaatgcaattgagaaatcgtttattttagtaactgtctgatctttttcaactttggagatggaataagttaaaaatttgctatttttcctgtaacatctgctgaacgggcccacccacacgttgtatattcagagagagagagggagtcaaggtgtgaccgtcgaccacagccagtgtcaggcctctgcctctgggcctttgctttgtggcctcactgcaacacaaagctccaccaggaggctggttcacgtcccctaccacggaagcgaggtcccagaaggccagcggtggttccaggagcaacagctcccaaaccctgagcaaggcaaccgatcgccaggaccaggaagcatcacccaggagatttggcgcccacttccacctcttctctcagttttggacaagtgacaaaccattttgccccctcactcttcttttttaactgttaaaccaaaggaaagcacaaatgaaggaaatcctgtgtaaagcattgagaaggaaagaagcctggagcagcctctcctgtccacagccaggggttaggtctgcaggcccgtctgcggtccccatcgagcatcaaggggacgctgtgtgtgctgcaagtgaccccgaaaacaaccacagccgtcacatggtcctcctgaagttggggcaccctcctctcagcaccaaaatggcccccactccttcgtgtcctcccgctatctccaaatcggacgttctttctagctgagatttttatttttccacatctgtagtgccatgaagcgattctgtctttgacttccaatggcaaacctgggtgatcgggaacaagcacgttgtacccttggctggacatggccaagacacaaggcattccacggcggcaagctgaccgcacagcagtctggcttgattttcagccgtcatcattgggttctgttttgacagctctgctgtcccatagggactgcgactgggaccaggtcaaccacgccaggggggtgtcaccagccttttctttttttctttctttttttttttttcctccttaagctgctgtcaatccaaaccattggcatcatcgtttcttttgaattaaaaccaacatatcagcaatagtctgctctccccgggaatctctaacatgctctgtttacatcgataaatgcacttaaggaaaacaaacaaattaaagctcatcttaaagtccaaggatttttatgtccacattttccctgtaggccacacggacatggccaggtgctgggggtgggtctggacaagatggtagagcccatggattaccccatcgagcggccacctcagaggagatgccacccatcatcaaaagactaaattgggaaaagaagcctcctggcttggtgcagtggctcacacctgtaatcccagcactctgggaggccaaggcgggctgatcacttgagctcaggtgttcgagaccagcctggccaacatggtgagcctgcgtcacctggcttctggcacacagctcggccactgtgtccctcctgcctccctggcaggtccttctaggggccctctcctggctggctttccagggcattccttccactctatccagggtccttcccaagaccacacccaggtccagtcattccctaggacttggcagagagctgtactcacagccaagatcacagcaaaatcagcaaagggaaaaggcatgcagagtgaagtccagaggcaaccagacagaagcatccagaatcctctcacagtggggtcacacaccccatgcttaactcccccaacaatgagttgtaacaacaggtgtgtaatgtgtcttttgtgaaagctagttggcagttctgtacccaggtgtttatggagccagtcacataggaaccctctacctggcacttatcaggattccagactcctacaaagaaagcaggggtttagcataaaccgcatcacttgtacagaaagtgtatgagccacgcatgtagggaagttttaatatccgtagggaactttaccaactgcaggcccaccttgccagcaggcctttctcaggaagcagcctcagatctattcattcttttctgcacacactatgcttttagataggccagtggctttcaagctgcaaatccaggccagacccaggtcggtttcacctgccactctctattccaatttgaatgtctcatcggcaccgtaagcataacacagccctgaccctggactccatccctgccttccccatcgtgcccacagctgacccctcccgagttgtagccacgaccacctggacctctgtgaccacttcctcatgggtttcaggtcctcacctctgtgtttcaaactattttcagagtgtccttacgaaactgaaatcagtgtcacctccttgcttaaagctctccccaggggctggggtgtgtggcttatgcctataatcccagtgccttgagaggcagaggcaggggaatagcttgaggccagttcaagttaaagaccatcctggacaacatagtgagaccccatctctaaaaaaaaaaaaaaaaaagtacaaaaattggccgggtgcagtggcgcatgcctcatcccagcactttgggaggccgaggtgggtggttcacctgaggtcaggagttcagagttcaagaccagcctggccaatatggcaaaaccccatctttactaaaaatacaaaaattaggcatggttgcacgcgcctgtagtcccaactactcaggaggctgaggcaggagaatcgcttgaacctgggaggcagaggttgcagtaagccgagattgcgccactgcactctagcctgggtgacagagcaagactccgtctcaaaaaaataaaaaatagtatggtggcatgcacctgtagtcccagctactcaggaggctgaggagggaggatcacttgagcccaggagttggaggctgcagtgagctgtgaccacaccactacattccagcctgggtgacagagcaagaccctttctcaaaaaaaaaacaaaaaacctccccaggtcttccttgggcttagggatacaacttacgcccctcaccgtggggcacaagcctctacacgctgcagccatagccctgcctactccttcctctttctctggctgcccttcctggctcactccactccaatcctctccttccttactccttcactccacactcatcactgagaaggccccagggcctttgcacttgccacaccctagtcttgtagtctcctgaaatgtgcaaagcccactgtccatcacatcatggttatccagggctacctctgcagaggcctctcccagtcatgcccttctctcttcctagctcatcttcatagcatttatgagaagttacctgttttcattgccaaccctgtccccactcagcccaaaacctccatgaggacagggacttctgtagtgtgcttgtgtgtggcctgaacccattgaattaatgaaggacacgcaaatggcctctagggtgagcacaagggaggagacatcctcttccctcaaagaaaccagcttccagggttgatcctgcagcctctgcagcctagggggcagctccccaggcattgcaaactcagtgggtttgggaacccccagccacaaactcccttcccacctgaccatgctagaggcctgccctggtggtccctggcttagctcccatcaaaatctctgtcatctctatccttgagcctccgagcacgcactcaggaggaccctgaatcctgatactaaaactcaaaagtcaccccctgccacggatgcctgataaatggccactttgggaaacttgctttctttccacgaaactttgcagtttctgtccaaaactgcaaaattcggagacagtgacagccaatggcaatgaatagcagatcctgactgggaacccatcctgtgcctggctttcttctgagcccttaatgggtcacggataagagggagctgcctgggcccgaatcccagcaccactcaagacccacggtgatagaggagctagaaagaaattatttaggcagatagtgagggcaccagagtccttggcggaatttcttttctaacaaaaagcagcccaagaaattattttttctaacaaaaagcagtctgagaaatcgagctgcagacatagataagcgagctagaagcttgcacggggaaatgccagcagctgcgtcaatagaaaacagttgcctgggtgccaggcaagaccaacgtggagactccatcttccctgtttttattaccacgtgtacagtaaagggatgggcaacatggcacagctcaggcagaggacccgcttgcatgataaaagattaggggtggccagaaattcacacccgatgcaaatggcacacctagtcctaaccagtttttcacaccctatgcaaatataacacctagtccaaccaatctttcacgccttatgtaaatcaaacactgcctcctcaccaggcatctataaaatcccctgcatttcactgtgcatctgtcaatgcattttttcaggacctctctctgcaggagggaactcttctctttcttttgcctattaagcttctcttaacctcactcttgtgtgtccacgtccttgttctccatggccatgagatgacaaatctcgggtatctaccccagatgaggccgtttcaatggcacagccttggacacatgccctcaacaactgaacttagtttcctctcttgcaaaataggggggatcatagtttccacctcataggatggctatgaagagccagggagatgatggatcccagaggaggcacaggtacatacataatgagcacagagacagaataggctgatatcagcatcatcactgtcctcatcactgtcatcatcatcattatcattattttaaagcagggtcatccggccgggcgcggtagctcacacctataatcccagcactttgggaggccgacgtgggtggatcacttgaggtcaggagttcgagaccagcctggccaatatggtgaaaccccgtctctactaaaaatacaaaaattagccagaaatcacttgaaccagggaggcggaggttgcaatgaacctagatcatgccactgcactccagcctgggcaacagagcgagactccgtctcaaaaaaaaaaaaaaagaaaaaaagaagcagggtcttgctctgttgcccaggctggagtgcagtggtgggatcatggctcactgcagcctcaacctcccaggctcaagtgatcctcctgccttagcctcccaagtagctggtactacaggtgcataccaccacacccaactaattgttttacttttttgtagagatggtgtctcactgcccaggctggtcttgaactggcctcaagtgatcctcccacctcagcctcccaaagtgttgggattacaggtgtgagccaccacacccaccctgttattactatgaccaccattgttcatcttgttccccaagaaaagtgcagtggtgcaatcttggctcactgcaacttctgcctcctgggttcaagcaattctcatgcctcagcctcccgagtagctgggattacaggtcccgccaccacgcctggctaatttttgtatttttagtagagatggagtttcaccatgttggccaggctagtctcaaactcttgacctcaggtgatccacccaccttggcctcccaaagtgctagaattacaggtgtgagccaccgtgtccagccagttctggacatttcatatcaatggaatcatgcactaggtggcctttgtgtctggcttctctcagcatcatgtttttggggctcatccacattgtagcatggagcagtgcttccttcctttctgtggctgaatcatatttcatggtgtggatgatggaaccacgttttgtttacccattcattcattcatggacatttgggttgtttccaccgtttggacaccttagctgtcatcatctgtgcctcagacataccaagttctttcctaccacagggcctttgcccgtgctgattttgtttgtttgtttgagatggagtctcgctctgttgcccaggctggagtgcagtggcaagatctcagctcactgcaccctccgcctcccgggttcaagcgattcttctgcctcagcctcccgagtagctgggactacaggcgtgcgccaccatgcccagctaatttttgtatttttggtagagacagggtttcaccatgttggccaggctggtctcgatcccttgacttcatgatctgcctgcctcagtctcccaaagtgctgggattacaggtttgagccaccgcacccagcctgcccttgctattttcttttctgcctgactgtcctgcatgtgaactcattcagcatctgtctcctcatagactgtgggccctagaagggtggggaccatgccaatcttgccttttttttttgagacacagtctcactctgtgacccaggctggagtgcagtggcatgatctcagctcactgcaacctccatctcccagttcaagcaattcttctgcctcagcctcctgagtatctgggattacaggcatgagccactacgcccaactaatttttgtgtttttagtatagacagggtttccccatgttggccaggctggtcttgaactcctgacctcaggtgatctgcccacctcggcctcccgaagagctgggattacaggcataagccacagcacccggcccgatcttgccttctgcttcatctgcagcatctagcatggtgcccatccagagctggggctcagccagtgtttgtgaaatcaatgaatgaatagaatgaaggcattgtaggaagctaaaatcataaaattacatcaagtccagggttgggcacagtggctcatgcctataatcccaacactgggaggctggggtgtgaggattgcttgagctcaggcgttctagaccatcctgggcaacacagcaagaccctgtctacaaaataaaaattgaaaaattaaccgggcatggtggtgtgagcttgtgattgcagctacttgggaggctgaggcgggaggatcacttgagcccgggagtttgaggttgcagggagctatgatggcacagtgcacttcagcctgggcaacagagtgagaccttgtctctaaaaagaatcgcatcaaacccagtgttggcagagcctaagggcttccccactccctgacatgtatgggcccagcattttcccagcactaagatggcattgtggccacctcccccaagagccaccccacgtgaatctgtgaatggcccacttaccagctgcggcctctgctgagaagcccagatctgtctccctggagaacctggtatcagagagagggggccttggaattctagccccgttatctccccatcagggcaccttcgttttcccctccacacccttccttcctctgggggacgcatgtccgtttgcgggccgaggcctgcggacactgaggggtgtgggggtgattctgttgcgacatctgaaaggaagacgttagtttgtgggagaccacatcacccaagcaggtcaggggaagcgaggttgggccgtttgtggtgaggtcttaggggactgtgctagagctgggccagcgtacccccatgttcctggaaactctaaaccccatgcaaataagagccccgatggtcagactttcccaggaggatcagagaagtgaagtgaagtgaaggccaggcccggtggctcatgcctgtaatgccagcactttgggaagtccaggcaggtagatcgcttgaggccaggagtttgaggctgcagtgagttgtacttgcaccactgcactccagcctgggcaacagaacaagatcctgtctcaaaaaaataaaaaataaaaataaataaataaatacttcaggcctataatcccagcactttgggaggccaaggtgggcagaccacttgaggtcaggagttcaagaccaacctggccaacatggtgaaaccctgtctctactaaaaatataaaaattagccaggagtggtggtgcacacttataatctcagctactggggagactgaggcaggagaatcgcttgaacccgggaggtggaggttgcagtgagccaagatcgcaccactgtactccagccggggcgatagaacaagacatcatctcaaaaataaaaaggccagatgcagcagctgacacctgtaatcctaacactttgggaggctgaggcgggaggatcacttgaacgagaccaacctggcaacatgacaaaaccccatctcttcaaaaatccaaaaattagccaggcgtggtggtggtgctcctgtagtcccagctactcaggaggctgagatgggaggatcacttgagcccaggaagtagaggctgtggtgagctgagactgcaccactgcactccagcctgggcaacagagtgaggggaccctactcaaaaaaaaaagaagaagaaaaagagattagccacagagaggtgaagtgagttgcccaaggcagctcagcccatgaggtctgaggcccaagccagagtctcccccaggcaaacacaaaggccttgcttgaattaagtcacaacaaagagtcctgattctctcactcccaactcatctccatgtgctgtgctggagagttgcctctcctagcatcttcacatgattaaggagggctattatgcccattgcacagatgcagaactgaggctcagagaggctgagcaactcaccttaggacacacagcaggtgagtgagaagcagggctccacgtgtctcctgcttagaccttgttgaccacagagggcagacgaggtgctgctgttgccgaggaggagcaggggggtgagagaggcacccagggtgagcctggggttatctagcccagctgggccagggcaataggcccttggggaggcccccagtaggatctgggccctttctgcctgaaaggagaggaggaagtagttttgtttgtctgcctggggtacgagcacacggccagagctggccaatctgttaggcacacagggcctgcacccaggacccaagtgctgtgtgggacttcccaaagggcttcagcttatttaaaatcagaagaaaaaaaactgaacatcctaataataaatatacaataaggaatccagcctggaccacatcggtcttaatgccaacacagttgtaaaatagaattttaagctggcacggcggcccacacctgtaatcccagcactttgggaggctgaggcgggtggatcacctgaggtcaggagtttgagaccagcctggccaacatagtgaaaccttgtctctactaaaaatacaaacattagccaggcgtgttggtgggcacctctaatcccagctactcaggaggctgaggcaggagagtcacttgaaccaaggtgggcggatcgcttgagccccaggagtttgagaccagcctgggcaacacagcaagatcccatctccaaaaaaaatatttttttaattagtcaggtgtggtggtgtgtgcctgtagtcccagctacttgggagcctgaggcaggaggatcacttgagtccagcagttcaagactgcagtgagctatgatcataccactgcactccagcctgagtgacagagtgaaactctgtctctaaaataggttagtcaattaataaaaatattttaaaatattttataatggaggaagtcctggtgtggacctatgcgtgccatgagaccccagcctgtccaggctcaattcagtttcaaggcctttgtgcctgctcttccctcccccagcctgggcaatatagcaagaccccatctctacaaaaaaatatactctttctgcactacgcactccccaaatcaagatgattccttctcaccctcaaatgccccttccttcacgtcagttaggtcacctctgtgggtttgtgcaactgctgttcccacttcctgtttcccctttggatttttttgtttgtttggggttttttgtttttttgttttgttttgtttggttttcgttggttttgttttgtttgagacggagttacactctcgctgcccaggctggagtgcagtggtgagatctcagcaaaccgcaacctccacctcccgggttcaagcgattctcctgcctcagcctcccaaatagctgggattacaggcatgtgtcaccacgccgggctaattttgcagttttagtagagacgggatttctccatgttggtcaggctggtcgcgaactcctgacctcaaatgatctgcccaccttggcctcccaaagtgctgggattacaggcatgagccaccgcacccagctggtgtttttttgtttgtttgttttgcgggggacagaatttccctctgtcatccaggctaaagtgcagtggcgtgatctcggctcactgcagcctctgcgtccctggtccaagcgattctcttgcatcagcctcctgagtagctgggattacaggcacccgccaccacgcctaatttttgtatttttagtagagacagggttttaccatgttggccagcctggtctcaaactcctggcctcaaatgatccacccgcctcggcctcccaaagtgctgggattacaggcgtgagccaccgcgcccagtttctgttccccctttgttgcttttgtttttgttttgagaaggagtctcactccgttgcccaggctggagtgcaatggtgcgatctctgctcactgcaacctccgcctcccgggttcaagcaattcttgtgcctcagcctcctgagtagctgggattacaggcgtgcgccgccacacccggctgattttcgtattttaatagagacggggttttgccatgtttgccaggctggtctcaaactcctgacctcaagtgatccgcctgcctcagcctgtcaaagtgctgggattgcaggtgtgagccaccgcacccgttccccgttctccctttgtaatgatgtctcactcctcttcactgcttgatagattatagatgccaggagtcagggggcctgcacctgtctccgtgtcacccctgtgtcctccaaacagcaggcacacagtaggtgctcaataacaacttgctgggggcaagacaggagcaagctgtctctgcacctgtggcaccagatgctttgttggactgcagacagggtgacttgagctgtccttgttccgcccccagggctcacctgcttgaggaaacaggaactgcctcggggcagccagccccgccccattgacgtgcagaccttgaatcgaaacccaggctcctgcaggcactggcacagctacagcgagggcctcggccatccaagggtctcccaggtatgtgacccaagagcctcagccctcgaggagacagaacgtgggggctgggctaggccagaaggagggacagggctagtggggcctggggtggcaggagggattttctaggggcatgggggagagcttcgtggaggagggggtatttgtggtgaccacaaatggaaaatggagctggagttagggaaaagggggtcttggcaagacaacagcatgagcaaaggtatggagaggcaagagagagagagcaaggatgtctttaggtctagaatgtgggtagcggggaagtagaggaggctcccaggccagggtcaggagcttgaatttgagcatgcggtctttcatcactagatagctgttcaccagcaaagacccttgcaccctcctctgtgccaggccagcaccaggacacagaaaaaaacaacaacacaggaacctagccctaagccctgatccctaggaggccctcaggctggtggagacagagcaagataaagacactctagctccatggagtcatggctggaccagagagaggaacaggggggaacgttggggacagagaggggtgccagggtgttgtctggggggagatgcaggaaagctgcctggaggaggggacatttttactgggttttgaaggataaataggagctcttccaagtaaaaaaaaagaataagcctgtaaacattaccccatgataggtcacaactggattcatgaatattgtatatatatctctatatatacacagtgctagctaaactttcctaggtaaatatcattattcccaaattaaagacagaaatacagggacagagagccattaagtgacttatctgaggtcacacagcggctaagtgggcgagctagggtttgaacccaggccatctgggtcgaattctaggctcttttttttttttttttttttttttgagacggagtcttgctctgtcgcccaggctggagtgcagtggctcgatctcagctcactgcaagctctgcctcccgagttcacgccattctcctgcctcagcctcccaagtagctgagactacaggcgcccgccaccacacccagctaatttttcgtatttttagtagagacggggtttcaccatgttagccaggatggtctcaatctcctgacctcgtgatctgcctgcctcagcctcccaaagtgctgagattacaggcatgagccaccgcacctgtcccaggctctttttttgttgttggtggtgatgggttttttttttggggtttttttttttttttttgtgagacagagtttcgctctgttgctcaggctggagtgcagtggtgcgatcttggctcactgcaaactctgcctcccgagttcagatgattctcctgcctcagcctcctgagtagctgagactacaggcacatgccactgtaagttttgtatttttatttcatatttatttattttgagatggagtcttgctctgttgcccaggctggagtgcagtggctcgatctcagctcactgcaacctccgcctcccagattcacgcaattctcctgcctcagcctcctgagtagctgggattacaggggtgagccaccttgcccagataatgattgtctttttattagagatggggtttcaccatgttggccaggctggtctcaaactcccagcctcaggcaatccgcctgcctcaggctctgacagtgctgggattacaggtgtgagctactgcacccagcctccaattccaggctcttaatcattttgtcaccctgctttattaaacatttcttaatacagttatttaattttggttgccccagaattccctcaggccataccccagagggtatgcttgacatctggttggagaaagtcaatattgactgccattggtcaacagaccccgcctcctcatagagacagcccagtaaaaagatcttttgagatattgaaacattagatggggccaatgggtggagggagtgagctccagtttaaggacagaatttatggtgagtggccgggcgcagtggctcacgcctgtaatcccagcactttgggaggccaaggtgggtggatcacttgaggtcaggatttggagaccagcctggccaacatggtgaaaccccatccctgctaaaaatacaaaaatgatccaggcgtggtggcacatgcctgtaatcccagctattcaagaggctaaggcaggagaatcacttgaacctgggaggcggaagttgcagtgagctgagatcgcgccactgcactccagcctgggcaacagagcgagattccatctcaaaaaaaaaaaaaaaaaagaattaagggtgagcaagaggggtcctgaaggaactatctagcaagatacaatcctttggcttgtcttacactcacttaataatgttttgcaaaacggtgctgctttctctctccagctctgtcattggtacacaaagtcccatggtaccgcttgcttaaaattgtcaagaaagtgtgtgaattaatgatgcatctgacatatcgtaggtgtgccatgagtggctacaacgtgtagtgacgttggtggcagaagtgactgtctgaagccacatttctctggtgtttaatgaaaccaaggcagccaggcactgtggctcatgcctgtgatcccagtatgttgggaggctgaggtgttaggattgcttgagcccaggagttcaaagccagactggacaacagagcaagaccctgtttctacaaaaaaattttcaaaattagccaggcatggtactgcatgcctgtagtcccaactactcaggaggttgaagtgggaggattgcttgagcctaggaggttgaggctgcagtgagcatgagctgtgattgcaccattgcacactccagcctcaggaacagagggaaaccctgtctcaaaaaaaaagaaagaaagaaatcagggcaaccctttttgaccaccaccgttgggtcagctgtttatttcgttcacttgccattttgtcatttccttattcctccaggggccttgatatttacttaatatttaaatactctactcttttttttttttttgagatggagtctcactctgccccccaggctggagtgcaatggcgcgatcttggctcactgcaacctctgcctcctgagttctagcaattctcctgcctcagcctcctgagtagctgggattacaggcacccaccacctcatctggctaatttttgtatttttagtagagatggggtttcaccatgttggccaggctggcctcgaactcctgacctcaggtgatccacctgcctcagcctcccaaagtgctgggattacaggcgtgaaccaccatgcccagctctaaatactctattcttaaatttcaaaacatttatttataaaatgaactttctagtccttgcaataatggcataaaaggctgggcacaatggctcacacctgtaatgctagcactttgggaggctgacacaggtggatttcttgagtccaggagtttgagaccaatgtgggcagcaaggtgaaaccccatctctacaaaaatacaaaaattagccaggcgtggtggcacatgcctgtggtcccagctacttgggggactgaggtgggagaatcacttgagggaagaaggtcgaggctgcagtgagccaagatggggccactgcactccagcctgggtgacagagtgagaccctgtctcaaaaaaaaaaaaaaagaaaaaaaacacaatggcataagaagaataaaaggaaaagtccttgaaggcctttggggatgagccaatgaatgaatgtgtaaaaactatcaggcacatagtaggtgcccaaaaaatcacaagccagtggttttttttttgttttgttttgttttgttttgttttgagacggagtctcactctgttgcccaggctggagtgcagtggtgcaatctcggctcactgcagcctccgcctcctggggtcaagtgattctcgtgcctcagcctcccaagtagctgtgattataggcacaggccgctgtgcccagctcatttttgtatttttgtagtgacagggtttcaccacgtggcccaggctggtcttgaactcctgatctcaggtaatccacctgccttggcctcccaaagtgctaggattacaggcgtgagccaccacgcccagccacacaagccagttttttgttgttgttgtttttgaaacatggtcttgctctgttccccaggctggagtgcagtggcacaaccacagctcactgcagccatatcctcctgagctcaagggatcctcccacctcagcctcctgagtagctgggactacaggcatgcaccaccacacccagctaatttttaaattttattttattgatttatttgcttatttattttttgaggagtctcactctgtcgcccaggctggagcacagtggcatgatcttggctcactgcaacctctgccccccgggttcaagtgattctcctgcctcagcctccggagtagctgggattacaagtgcccaccaccacacccagctaatttttgtatttttagtagagacagggtttcatgatgttggccgggctggtctcaaactcctgacctcaggtgatctacccaccttggcttcccaaagtgctgagattacaggcgtgagccaccgcacctggccaaattttttaattttttgtagagatgggggtctcactatgttgcccaggctggtctggaactcctgggctcaagcaatcctcccaccttggcctcccaaagtgctgggattacacatgtgagccgtcacacccagccacaagccagttttaagtccattgctctgtccaccctggaggacttctcaaaggaggaggcaccacaagcttcaagaatagagcaaagataagaggtgcatcaagcttgattcttgtcttccctcccttctctacccaggtgaccttccctccaccccaggaagctatgacagaggccgggaagctgcccctaccgctacccccacggctggactggtttgtgcacacccagatgggccagctggcccaagacggggtccccgagtggttccatggtgcaatctcaagagagtgaggacacacccacaccctccaccctgccctccccaccctgtccttgtctgtccctaccctgggcagcttttaactgcagaattctggacttggctcagctcagtgtggcaagaggctaaaatgagctccaggctcccaggcttgaatcctgccacctctttgggctcactgtgtgacctggggcaagttacttgctctctctgagcctcagctttctctatacaagtggccaacagaccagcactgccagggacctggcagcaccccacacctcgcccaggccaagcattaccaatcaacgatggcagcatgcagcctcagaatctttctctctttctttttgagacagggtctcactctgtcacccaggctggagtgcagtggtgcaatcttggctcactgcaacctctgcctcccggactcaagtgattcttccgcctcaacttgctaagtagctgggattacaggcacatgccaccaagcctgactaatttttgtgtttatagtagagatagggtttcaccatgttggccaggctggtctcaaactcctggcctcaagtgattcacccgcctcggcctcccgaagtgctgggattacaggcgtgagccaccgcacccggccagaatctttctgaacacagtactccaagcagctgctctcaacccatcaggatacaaccaatgtgccctttctttttttttctttttctattttttttttttgagacagagttccgctcctgttgcccaggctggtgtgtagtggcgcgatctcggctcactgcagcctctatctcctgggttcaagcaatcctcctgcctcatgagtagctgggactacaggcatgcaccaccgcacccggctaatatttgtatttttagtagagacgaggtttcaccatgttggccaggctagtctcaaactcctgacctcaagtgatctgccggcctcggcctcccaaagtgctgggattacaggcatgagccaccgtgcctggccccaatgtgccctttctacctcagactgtgagctctgaggatgtgggcccggctctaactaaatggaggaaaaaatatttatggccactctctgcatgcaggaaattgagaaaattctgtgaaggccacagagaggaagtagtattggtcatggtttctgagctctggggccttgctgaataacagaaatataacatgagttgcacattgcaatttaaaaaaattttagtagttatattaaaagaagcagctggctgcactggcacttacctttaatcccagctacttggaatgctgaggcgggaggatcgcttgagcccaggagttcaaggctggcctggacaacatagtgagactccatctctaaaaggaattttaggctgggtgcagtggctcatgcttgtaatcccagcactttgggaggccgaggctggcagaccacctgaggtcaggagtttgagaccagcctggacaacatggtgaaaccttgtgtctactgaaaatacaaaattagccaggcgtggtggcgcatgcctgtaatcccagctactcgagaggctgaggcagcagaatcacttgaacccaggaggcggagattgcagtgagctgaggtcgtgccactgcactccaggctgagcaacaagagtaaaactccgtctcaaaaaaaaaaaaattaactgggcacggtggcacgtgcctgtaatcccagctactcgggtggctgaggcaggagacttgctggaaccctgcaggcagagatcatgccactgcactccagcctgggtgacagagcaagattccagctcaaaaaaaaaaaaaaattaaaaaaattagccaggcgtgtggaacatgcctgtggttctggctactcaggaggctgaggtgggaggatctcttgagcccaggaattcaaggtttcagtgagttatgattgcatctctgcactccagcctgagtgatagagtaagaccctgtctcaaaaacaaaaaacaattcatgaaacagcatatgttccttttttgtgttgttttggaaatcagtacaaaaggccagtggcctctgtattgaacagtgcaggaccaaagtctccccagcttgtcccacagaaggcggccttcctctctgtgaactccagataataatggtaataatatagaaaatagactgatttcggtggctcacgcctgtaatcccagcactttgggaggccgaggcgggcggatcaccagaggtcaggagctcgagaccagcctggcaaacatggtgaaaccccgtctctactaaaaatacaaaaaattagctgggcgtggttgcgggtacctgtaatcccagttacttgggaggctgaggcaggagaatagcttgaacctgggaggcagaggttgcagtgagccaagattgcatcattgcactccagcctgggcaacaaaagcaaaactccaactcaaaaaaaaaaaaaaaaagagagagagagagaataatagtaataataacagcaaacattttgggagcacttaccaggtagcagctgtcatgcttatgttgcaagttctttctgttctcacagcagccttggaagtggagtttactctccccttgaggaagctgaaggtcagaaagggagagacgattgcctgaggtcacacagctgatggacagtagagctgggttatgaactcgaatgcatctgagcatacaggtccttctttgttacttgtgacaccttgatccacccaaaggtgccttaatcgggggattccaggcattgggaaggggctgtgggagatgggaggaggtctggcctgagatcaaggtcatcagacgcctcctagctcctcggggggaacatccctaatccctgaatagcccaaggtctgccacagctgaaaaaaaaaaaaaaaaaaaaaaaagatgggtttggggtgtttgttcatttagaaaacaggccgggcacagtggctcacacctgtaatcccagcactttgggaggctgaggcaggcggatcacttgaggacaggggtttgagaccagcctggccaacatggtgaaaccctgtctctactaaaaaaaaaaaaaaaaagttgggcatggtggcgggcgcctgtaatccccgctactcaggaggctgaggcaagagaatcacctgaacccaggaggttgaggctgcagtaagccaaggtcacgccattgcactcagcctgggagacagagcgagactctgtctcaacaaaaaaaaaaaaaaaaaggaaaaaagaggccgggcacggtggctcacacctataatcccagcactttgggaggccgaggtgggcggatcacgaggtcaggagatcgagaccatcctggctaacacagtgaaaccccatctctactaaaatatacaaaaaattagccgggcgtggtggctggcgcctgtggtcccagctacttgggaggctgaggcaggagaatggcgtgaatccgggaggcggagcttgcagtaagttgagatcgcgccactgcactccagccggggggacagagcgagactctgtctcaaaaaaaaaaaaaaggaaaaaagaaaaatgaaaactaccagccttctccatgaatgatcccatggccccaggagtctaactggtacgtggggcggctggactgtttcatttcctttctgtgtgtgcccttccagggatgctgagaacttgctggagtcacagccactgggatcctttctcatcagggtcagtcacagccatgtgggctacacactctcctacaagtaaggcctgggccgggatccagggcaggggcaggtgggctcttgggtttccttggagggggcaaggggtgcttcatgtcatagcttctcagaaagcagcagtaactgaggctgtggatctgagaacgggagctgctagccaagcaatgagtgaagcttttgtccgtagtggcatgttttatctgaggccagcctttgtactcctgtgttataaatgggggaaactgaggcacagcgaggttagtaacctgctgggtgttgcatggccagtgagtgaagaagcctgcatgggaacctggggtagtctggctgtagcagtgacgctgccggcccaagggctggggacttggggcagggatgagggggagtaggatgtcccagcccccgcagtgtctccgcagagcccaaagcagctgctgccatttcatggtgaagctcttggatgatgggactttcatgatccccggggagaaggtggcccacacctcgctggacgccctggtcaccttccaccagcagaagccaattgagccgcgcagggagctgctgacacagccctgcaggcaggtgagggcggggacccacaaggttcacagccatttccttggggccaagccccccagacccctttgtttcccacgcccccatcagctcctcttgattctgtcactctcatggtccttggcccctccggccccaccccagtagtccctctgccccccacagcggtctccgttgtggttcctgcttccccatggctccgccctccaggcccatgtcaacaggctgattttttataagggttcatgtgccaggtataatcttggctcatctgaaggaatgacatctttccttagaaggctcggtgggcgtggcctggctcccaatacgctttccttagaaggctcagtgggtgtggcctggctcccaataaactgctgtgggtggagcatctttccttagaaggctcagtgggtgtggcctggctcccaataaactgctgtgggtggagcatctttccttagaagctcggtgggcgtggcctggctcccaatacgctttccttagaaggctcagtgggtggcctggctcccaataaactgctgtgggcagggcatgtttccttagaaggcccagtgggcgtggcctagcccctaagaaactgctgaggggggttatctctccttagaaggctcagtgggtgtggcctagctcccaataaactgctgtgggcggggcatctttccttagaaggctcagtgggtgttgcctagtccccaagaaactgctgtgggcagggcatctttccttatagggcttggtgtgcctggcctagctcccaagaaattgtggtaggtggggcatctttccttagaaggctcagtgggtgtggcctagctcccaagaaactgctgtgggtggggcatctttccttataggactcagtgggcctgacctagcgcccaagaaactgttgtgggcggggcatctttccttagaaggctcagtgggtgtggcctagctcccaagaacgtgctatgggcggggcatctttctttagaaggctcagtgggtgtgtcccaatccctaagaaatggctgtgggtggggcatattttcttataacgcttagtgggcgtggcctaggtactaagaaactgctattcaagggatggtccctgagacctgccttccagggtccgtgcaggacctttccccctccctagtgctgagctacaggccccttccgccctgcagaaggatcccgcaaacgtggattacgaggatctcttcctctactccaacgcagtggccgaggaagctgcctgcccggtgtctgcccctgaggaggtatgtatatgacaggaggctggcacctcccacctggctgaggggcaggagtggaggtggtcaacagcttccagaggaggctccttctagaatgagaatgcgatcctacagcttggtgctttaaacctttccagtgcttttgcaacaccgagattaaaattcaaactacaatctgaggtcctctttctgcctgtcacctacccagcgccagccctgctgccataccgtctgttgttcagacacaccaagctagcctcggggtctctgcgtgtgccggccccacctcaggtcctttgcacaaactgtgtgccctgcccctagatttcccatgtcttcattcatttctccttcaagtgcctccttccccaggccccagacctaaagcaacaccttctggattctccttcacattaccctgtttattcactgcagcggacttcccaaaagtgttcctcaaaatcctatttacttatgggtttacatgctccctggctgcctttccagtcagactgtgagctctgagagactggagactccatctggcttgtttgcctttgcttctcccacccctctgaaaggacctgccatattgaaggtgcttaactaatgaatctgtggagtagatgaatgaatgtatcacagcatcttggggtttgggagacctttaggcacccctaggttgaagtctaagtgctctccaagccccctgcccagcaggggaagttatgacagtggtacaaatgaaacaggctggtgtgatggacatcagtggaggtggggggtgcaagtgggggaaggcagtcagggaaggcttcctagaggaggtggcttatagctgagatctgcaaggtgaggaggagccagtcatacacacagacacagggaggacattccaggcagcgggaatggcacttgcaaaagtcctggggcttggtgtgtttggaaaacagaacaaaaaaagccagcatatagatggattggggttagtgagagagagattgtcagaagttgaagccccagggtcaggaagggccaatagtgcagggccttggagccaaggtgaggagctgggattctagtccagttgcaccagggaggagccaaaggagagtgtatgcatgggaggactttttttttttttttttttgagacggagtcttgctttgtcgaccaagctggagtggaatggcacagtctaggctcgctgcaacctccgcctcccaggttcaagcgattctcctgcctcagcctcctgagtagctgggactacaggtgcgtgctaatttttgtatttttagtagagacggggtttcaccatgttggccagactggtctcaaacccctgacctcatgatccgctcacctcggcctcccaaagtgctgggattataggcgtgagctaccacacctggccggaactggtggttttaaatgtttcctgtggctactggctgcagaaggggctttcctgggcactggtggagatggaaagaaggaggaagtgaggtgggggtggaggacagtgtcaaggtgggagggacaaaaatgagagcccaggtgtggaaagaaacatggatatttggtctgcgtagtggctcacacctgtattcccagtgctttgggaggctgagaggagaggattgcttgaggccaggactttgagaccagcctgggcaacacagcaagcccgtctccacaaaaaataaaaaaattagccaggcatggtggcgcacgcctgtagtcagctactctgggggctgaggtgggaggattgcttgagcctgggaggtcgaggctgcagtgagccatgattgcaccactgcactccagcctgggtgacaaagcaagaccctctcaaaaaaaaaaaagatttgtagagatggggtctcactacattgcccaggcaggtctcaaactcctggcctcaaaaaatcctcctgcctcagccttccaaagcactgggattacaggcatgagctatcacacctggccccacatttttgtaaagatagtattttgtaacctgtgaaaatcagataaaattcatatttccatgtttatcaataaagctatattagaacccaggcacgctcattggttcacgtgtgacctctggcatccgctacaacagcagagctacataattgagacggatggtacagcctgcaaagttgaaatatttactctctgactctttgtaaaagaagtttgccaggccaggtgcggtggctctcatctgtaatcccagcactctgggaggccgaggtgggtggatcacctgaggtaaggagttcaagaccaccagggccaacatggtgaaaccatgtctctactgaaaatacaaaaattagccaggcgtggtggtgtgcttttggttctagctacttgggaggctgaggcaggagaatcgcttgaacccaggaggtggaggttgcagtgagccgagattgtgccactgcactccagactgggcgacagagtgaaactccatctcaaaaaaaaaaaaaggaagaagaacaagtttgccaacccctgggggagacagtgaagccatttactgagacgagaaagatggggcatgggatcaggtttgggggttcacacggggacgtttctcagccacagggtgtctgggtggaacccaggctccaatttctgggacagacatggtgctctggtgggcaagctgccccaggcctcccctactctcattttcaggcctccccaaagccagtcctgtgtcaccaatcaaaggaaaggaagccgtcagcagagatgaacagaataaccaccaaggaagccacttcctcctgccccccaaaatcccctcttggagagacccgccagaaactctggaggagcctcaaaatgctccccgagagaggccagagggtccggcagcagctaaaaagccacctcgccactgtgaacttgtcgtcactcttggatgtccggagatccacggtgatctcaggccctgggaccggaaaaggcagccaagatcactcaggggatcccacctcgggggacagaggctacacggatccctgtgtggccacatctctcaaaagcccctcacagccccaggcaccaaaagacagaaaggtccccaccaggaaggccgagaggtcggtcagctgcattgaggtgaccccaggggacaggagttggcaccaaatggtagtgagagccctatcctcccaggagtccaagccagagcaccagggcttggcagagcctgagaacgaccagctcccggaggagtaccaacaaccgccaccctttgcccctgggtactgctagagaacaggtccaccctggctctgggactcgctgccaggggctgccacactcctgaatgccttaacatttcttccatggccccacaccatggcatccgggggtcttcgggaacccgggaaatggaataaagatgtttttggggtctgttcctgcactcacccatggggtgagctggttattttagcaacaatcatcagagtgacgctgatggtttggggcaccagctatacatcagccccagtgccagaccttctattcattattttacgcctcagagcaaggccctcagggagggtcatcctccatgttttgaagaagagactgaggttcagagaggataagaggcgtgaccaaggccacagagctatgggtgtcagcaccaggatttgaagccaggtgaatccgagcccttttcccatatcatctgtttgttctgttgtctaaaagcacactgcaagccgggctcagtggctcatgcctgtagtcccagcactctgtggggccgaggcaggcagatcgcttgaggtcaggagttcgagaccagcctggccaacatggtgaaaccccgtctatactaaaaaattcaaaaattacccggacgtggtggcgcatgcctgtaatcccagctacttgggagcctgaggcgggagaattgcttgaacccgggaggcagaggttgcagtgagccgagatcgcatcactgcagtccagcctggatgacagagtgagactccatctcaaaaaataaataaataaataaaaatgaaattaaaaaataaaagcacgctgcagggtctctctccaaccggagcttcgtccaggctcaactccgagtgtgtccccagcggcaccattggctgttcatgccttcctcctggggttttcatgcagatgaaggagacgagttgtgttgagggcctggtgtgcagtaggcacttggacatcatcagtgttggcttcaggagaagcacatgagcgtctttcctttaaaaagggaagaggcagccgggcgtggtggctcacacctgtaatcccagcactttgggaggtcgaggcaggtggatcatgaggtcaggagattgagaccatcctggctaacacggtgaaaccccgtctctactaaaaatacaaaaaattagccaggtgtggtggcgggcacctttagtcccagctactcgggaggctgaggcaggagaatggcgtgaacccaggaggcggagcttgcagtgagccaagatcataccactgcactccagcttgagtgacagagtgaagagtctgtctcaaaaaaaaaaaagggaagaggcagccgtgtgtggtggctcatgcctgtaatcccagcacttgaggagggtgggaggtgggaggattgctcaagcccaggatttcaagaccagcctgggcaacatggcaaggcctcgtatctacaaaaattcaaaaaattagccaggtgtagtggcacacacctgtagtcccagctatttgggaggctgagacgggaggatcatctgaccccaggagttcaaggctgcagtgagtcatgatcaccccacttcagcctgagcaacagagagagaccttgtctcagaaaagaaaaaaaaaaaaaagaaagaaaaagctggccggacgcagtggctcacacctctaatcccagcactttgggaggccaaggcaggtggatcacctgaggtcaggagttcaaaaccagcctggccaacatggtgaaaccccgtctctactaaaaactacaaaaattagccaggcatggtggcttgcgcctgtaatcccagctactcaggagactgaggcaggagaatcgcttgaacctgggaggcggaggttgcagtgagccaagaccaagccactgcactccagcctgggtgacagagcaagactccagactgggtgacagagcaagactccatctcaaaaaaaaaaaaggctggggacggaggaggcatcacagggccatgatggtggagggctctggagggaatcctaggttgtggggctgtgtgacctttggcaagtctagacatctctgggcctactttcttacctggaaaatgagaagagcagtccctcttcaggatgaactggcagaatgcatgtaaaacctgggactttggtgcacagtaggtgtttttctttttttttctttttctttgagacggaggagttttggtctgtcgcccaggctggagtgcagtggttcgacctcggtccactgcaacctctgcctcctggttcaattgattctcctgcctcagcctcctgagtagctgggactacaggaatgcaccaccacatccagttactttttgtatttttggtagagacagggtttcaccatgctgcccaggctggtctcgaattgctgggctcaggcgatctacccgcctcagcctcccaaagtgttgggattacaggcgtgagccactgtgcctggctcctttttttttttttttttggacagagtctcgctctattgcccaggctggagtgcagtagcacgatctctggtcactacaacttccctttcctgggctcaagcgatcctcccacctcagcctcccaagtagctgggactacaggcatgcaccaccacacccagctaatttttgtatttttggtagagacagggtttcaccacgttgctgaggctggtctcaaattcttgggctcagacaatctgcccaccttggcctcccaaatgctggggttacaggcttgagccaccgtgcccagcccagtagctgcttaatttattagcgggttaagatgggagtgagctctctagacatgacatactgtacaatggaggtgtctgggaaggtccctaggggctggtcttggttgcaggagtgactactccttggactgactggggcatagatgggggccctggggcaaccccaggtggagggggtgtggggttccccaaatgtacaaggttcagacatctgggatctggtatgaggtgcacctgggttcaagcccgcccctgcaaatgacttgtggggtggccttaggcaagtcactctgctccctccaaatgagggcatgatcctcggccaactctgcagggatgttatagggggtcagtgtcacgttagggggcagatgcatcataaactgtaaagtgcagcagccacctcagtgaatgacatttccacccctcccaatcagtggtctcctcttggcagctctaatgagtcagcccgggaggaaaagtttcaatccctttgatgactcagggtttgagggataaaaagaaacttgagtagtgaagggtgaggtttggccttcagagtgggaaccctggggtaggacagcacgggcccgatctccccaccacctcacctccgccacggacacccacaacaaggcatttccagccttcacagtgaagacgatctaggagtcaccccttccttgtacaaacagggagatcgtggcccagagagggtgtggccacactcagggtcacacagcaaagtcaaagataaaattctacgccgcctccctcccatcttccagttttaaggtggaaaaatgtgtcctcccagcaggtgtgactcagtgacttgtgtttattctcagaaaccagagtccacagcgggtgaggggtcaccccgccctcctatagctcggctcctctgtggtgccatcagattcggatgtggaaggtgctgtgtgcagagagaaaaggagtcaaggccttcaaggagtggacaaccccttttcctcctccccctcaacacgctcacggcaagtccctgggacaggcaggaaggatgccacatggacccctcaaacaaccctaggccgggagacccctacaggggctgagagcacatgcctttaattttttaattcttttttttttttttttttttttgagatggggtcttgctctgtctcccaggctgtagtgcagtggtgtgatcttggctcactgcaacctctgcctcctgggttcaagtgattctcatgcctcagcctcccgagtagctaggattacaggtgcatgataccacgcccagttaatttttctattttcagtagaaacggagtttctcaacttgctttgttgcccaggctggtctggaactcctgtgctcaagcgatccacccaccttagcttcccaaagtgctaggattacaggcatgaatcaccacatcctgccatatgatataaagtttcaaatagctagaagaaggatactgaatgttctcaacacaaataaatgatacatgtttgagatgatggatatgctaatgaccctgatctgctcatcatacattatatgtatcgaaaccattatgtggcctggtgcagtgactcacccctgtaatctcaggactttgggaggccaaggcaggaggatcagttgaggccaggagtttgagaacagcctgggcaacaaggcaagaccttgtctccacaaaaaaaaaaaaaaaaaaaaaaagtttttagttagctaggcgtggtggtgtgtgcccgtactcccagctactcaggaggctgaggtgggaggattgctcttgagcccaggaggtagaggctgcagtgagctatgattgtgccactgcactccagcctgggcaacaaagtgagaccctgtctcaacattttcagcactgcctcagcttatagataaaaacaaaaacaggccgggcatgacggctcacgcctgtaatcccagcactttgggaggccaagatggacagatcacctgaggtcaggagttcaagaccagcctggccaacatggcgaaaccttatctctactaaaaaaatacaaaaattaaccgggcgtggtggcgggcgcctgtaattccagatactcgggaggctgaggcagggagaagtgcttgaacctgcgaggtggaggttgctgtgagccgagatcgtgccactgcactccatcctgggtgacagagcgagactccatctcaaaaaaataaaataaaataaattaattaattaataaaataaaacaaacaaaattagccaggcacagtggcacgtacctgtagtcccagctacttggtttattcttattttatttcttttttcttttcttttcttttttttttttttttttttttgagacagagtctcgctcaagctggagtacagtggcgcaatcgtggctcactgcaaacctccacctcccaggttcgggttcaagttactctcctgcctcagcctcccgagtagctgggactagaggtgtgccccaccatgcccaggctaatttttgtatttttagtagagactactgcctcagcctcctaaaatgctgggattacaggtgtgagccactgcgctcggccccgtagtcccagctacttaggaagctgaggtgggaggatctcttgagccgaggagttagaggctgcagtgagccgattgcaccatgcactgcagtctgggtcactgagtgagaccctgtctcaaaacaaacaaacgggctgggcgtggtggctcacgcttgtactcccagcagtctgggaggccacagtaggtgaatcacttgaggtcaggagttcaagaccagcctggccaacatgacaaaaccctgtctctactaaaaatacaaaaattagctgggcatggtggcacgtgcctgtaatcccagctactcgggaggctgaggcaggagaatcacttgaacccaggaggtggaagttgcagtgagctgagattgcaccactgcactccagcctgggcaacagagcaagactccgtctcaaaacaaacaaacaaacaaaaagaaacatcactgtgtaccccatgaatatgtacaatcattatttgtcaattcaaaaaataaaaaataaagtgaaatttaaaaattataagataataatagcaacagcaatttattaaacacctattgtgtgccaggagctgtgctgaattttctccatatattaatttggggttcagcaaacctttttctgtaaatggccaaatagttgatgttttcaactttataccatgacgcaactctgttgttgaagcacacaagcagccatagacaaaatgtacacaaatgggtgtggctgtgagccaatacaactttactgatggacacagaaaagtgaatttcgtatcactgtcacgtgtcatggaataatctttttttaaattaaaaaaaaatttttaatgtgtttatttatttttgagacagaatctcactctgtgacccaggctggagtgcatggcacaatctgagctcactgcggccttgacctcctgggctcaagcaatcctcccgcctcagcctcccaagtagctgggactacaggcatgcaccaccatacctggctatttatttatttatttatttgtagatatggactctccttatgttccccagtttggtctcaagctcctggggtcaagagatcctccccacttagcctcccaaagtgctgggattaaaggcatgaaccaccccacctggttggaatattattattctttgattgttttttgatcttttgaaaatataaaagccattcttagctcacaggaggtacaaaaccaggctttgggtcagactggcctattggccgtactttgccctgcagtggcggctgattttccccaaaggctgccaagtacagttacacagtctgttcactgcaaactgttcaggcaacaagggctgaagtccagccacattctgcttgctgaaagaggtgtatccactcgcaagaggtgcccagggggtccctaattatccccattttacagatgcagggactgagactagggaaattgagaaagtttcccaaggtcatgaaagaatgaatagaggaattttcagaaacagagtctgtgaactgtctgcgtaagagccccttcagatgtgcaaatggactgtgggcggtgacggagagcatcacctgaggaagtctggtgcccggaggatcatgttctggaaatcttccagggacagccgcccatcatggtctccatcagcctcatccagcaccttctcacataccaggctcacctcctcggcactcagccccccccgcgtcagtttggtcaccgtctgctccaggtcccacgcacaaatgtagtcgtcgttgttaaaatctgcagagcaggatggatggggagtgacagcaggtggcaggagggctaggccggctgtgggcacatactgtgcccatgttacaagaaggggaaactaaggtcgggcacggtggctcacgcctgtaatcccaacactttgggaggctgaggagggtggaacacctgaggtcaggagttcgagaccagcctggccaacatggtgaaatcccatctctactaaaaatacaaaaatacccaggtgtggtggcatgcacctgtaatcccagctattcaggaggctgaggcaggagaatcacttgagcccgggaggtggaggttgcagtgagccaagatctcaccactgcactccagcctgggcagcaagacagaaactccgtccaaaaaaaaaaaaaaaaaaaaggaactgaggccctgggagggcacccgagaccctggtgtaaaatctggaacttgccttaaaattgggcagggacctgctgggagttcattcattcattcaacaagtatttatgcaatgaatttttcattcgttctttttttttttctttgagacggagtctcgctctgtcgcccaggctggagtgcagtggcacgatctcggctcactgcaacctccacctcctgggttcaagtgattctcctgcctcagcctcccaagtagctgggattacaggtgcctgccaccatgcccggctaatttttgtgtttttagtagagatgggattccccatgttggccaggctggtctcaaattcctgacctcaggtgatccacccacctcggtctcccaaagtgctaggattacaggtggaagccaccacacccaacctcattcattcatttttacaagcattgagtgcctgctgtgtgctaggcactgtaataacttttttattcactcatacaagtatttattgagcatctactatgtgtcaggcatcacagtaactgattttcattcactcactcactcaacaagtatttattgagtgcaattttcattcattcactcacttaacaagtatttattgagtgcctactgtgtcctggcactgtgataataatttttcatttactcattcaaaaaacagttatgggcccggcgcagtggctcatgcctgtaatcccagcactttgggaggtggagatgggtagatcacctaaggtcaggagttccaggccagcctggccaacatggtgaaaccccatctctactaaaattacaaaaattagcggggcgtggtgcgggtgcctgtaatcccagctactaggtaggctgaggcaggagaatcgcttgaacccagggagtggaagttgcagtgatctgagatcgcgccattgcactccagcctgggcgacaagagtgagacgctgtctcagtaaaaaaataaataaataaaaatagttattgagtgcctactatgtgccaaacactgtgacagctctttcattcatttattcaagtatttcttgaacacgtactacgtatcaagcaccatgatatctgtttttcatttattcactcactcaacaagtatttattgagtgcctactgtgtagtgggcactgtgataacttttttcatctattcactcaaaaagtactttttaactgcttactgtgcaccaggcactgtaataactttttcatttattcattcattcattcatccattcaggaagtatttattgagcacctactacatgttgggcaccataactcttttattcactcactcaacaagtattagtgtctactgtgtgccaggtactctgataactttttcattcattcattcatgcaacaagtatttattgagcacctactatgtgttgggcaccatgataactatttttcatgtactcactcaaaaagtattatggtggcagggcacggtggctcatgcctgtaatcctgccactttgggaagccgaggtgggtggatcacttgaggttaggagttcaagaccagcctggccaacatggtgaaaccccatctttactaaaaatacaaaaatttggctgggcgtggtggttcatgcctgtaatcccagcactttgggaggctgaggcgggtggatcacctgaggtcaggagttcgagaccagtctggccaacatggtgaaactccgtctctactaaaaatacaaaaaattagtcaggcgttgtggcaggcacctgtaatcaatctcagctactcagcaggctgaggcaggagaactgcttgaacccggaagacggaggttgcagtgagctgagatcgcgtcactgcactccagtctgggggacagagcaagactttgtctcacaaaaaaaaaacacacacacaaaaaaaacaagtatttattgagtgcacacaaggtgccaggcactaagataactgtttttctttcattcagtcattcaacaaatatttactgagccaggctcagatgacaggtggtgagcaaaatagatactgttggtacctttgagtcttctcagggacaaagtcaataagaagtgaacaggtcaaggaacaagaaattaagcagcattgcctggtgctagaagagaaataggatggtgggatggggggatgaatggggagaggcctacttttgacctagacttcaagggtaagaaggagccaggggagctgggtgcggtggctcacgtctgtaatcccagcactttgggaggccgaggcgggcggatcacccgaggtcaagagttcgagacaagcctggccaacatggtgaaaccccgtttctactaaaaatacaaaaattagccaggcgtgatggcacctgcctgtaatcccagctactcggaaggctgaggcagaagaatcacttgaacctgggaggcggagactgcagtaagccaagattgagccactgcactctagcctgggcaaaaagagcgaaactccatctcaaaaaaataaaaaataaaaatcaataaataaataaggagcaaggcgaaaggtgttctaggcagagggttcagcagaggcaaaggcccagaggccgaagactgtgtttgaggaacagcaaggcccatgtggctggaatagagttagcaaataaatgaggtggggaggcattggagtggggtggaggacagggccacatagggcctcaaaacccctggggagatatttgtgatgtgggtgccacccacccagttcccactccccaccccatccccatgcttcccaaccccagggccacgcacgcaccataaattttaaaagcatagtaagccttgaggtcgcggggagccatttcactcatcacggaaaacatgtccaaaaagttgtccagggtcatgtggccatccccatcctcagagaatacctgggcaatcctctggcggaaggggttgtcctggggacagaaaggaagctgggaggccatcctctgacccccaaggtctctggggtccatgtggtctcactatcagcacccaccttctgggaacctccaagtaccctccatcaagacccactccctcccatggtccctggacaggactttggacaactccaccctccacccctgtgatctgagcaaccttgccccaacttccagctcttggagcagccatgtgacccaggcaaggccaatcagagagttccattcacctggcaatagtgattggctctgtgatgggcatgtgactcaagctagccaatcagaggctgacctgggatatttttctgaaaaattgggagggaggggacctgattactgctgcttgcaaagctcacagaagctaaagctgagtggctgagaggtcccttcacagcctcaagaggtgaggctgccttagactgaaacctcttcctgggaggagccgagatatggggggagattcctgagcacatcatcagaggccctggttccagctgtacctgacactgtccctgcctctggatttttttgttgttgttcaggggcaatccattttgatccaaaccattctgtccctctcaaataaggtttttgtcacttgcaataaaatcaaccctactcacagtcagttactcaacccacaagttccccttggaggcacaaaccatgtgtcaaacatcctgctgataaaaacctgcatttagcagctcctgttacaagaagaactaacgttctctgagtacttgacacacaacacaccctgtactgaatttgttgcctgtattatctcgtttcatcctcccaattctgggtgttttttgtttgttgtttgtttgtttgtttgttttttgagacagagtctcactctgtcgcccaggctggagtactgtggctagatctctgctcactgcaacctccacctcctgagttcaagcaattctcctgcctcagtctccctagtagctgggattacaggtgtgcactaccacgcccagctaatttttgtatttttagtagagacggggtttcaccatgttggccaggctggtctcgaactcctgacctcaggtgatccacccgcctcggcctcccaaagtgctgggattacaggcttgagccaccacaccagccaactctgggttttaaccctgtctctgtcacattgtagctgtgtgaccatgaacaagtgtcttaacctctctgagtctcagttttcttatctttaaaatggggataactgcagcactgacctcagaggaatgcaacgagagacatctctactattttttaccctgtttgtcccatggcctgggcataccttcagctcgggcatgctgccaatgagctcgtagggcaccttcacatcggggcaggtggtatagtcgaggggcacgagctgtggggccaggtcctggtagcgatagaagagcctgatgtggggaggaaaaagctgggaaagactgggagcagggagcaggcaagacgcttgtcccttctttgttttttgagacagagtctcggtctgtcacccaggctggagtgcagtggcacaatctcggctcactgtaacctctgcctcccgggttcaagcaattctcctgcctcagcctcccaagtagctgggattacaggcacaccctgccacgcccggctaattcttttgtatttttagtagcgacggggtttcatgttggtcaggctggtctcaaactcctgacctcagatgatccacctgacttagcctcccaaagtgttgggattacaggcgtgagccaccgcacctggccaagtcccttctctttcacattcacagctgctcactgcacactgaggtatactgggtccccaagaacactcagccctgggcctggacctcaagcatacagagcctgacacaggcacccctaacctccctgggggcagggtcaaggtgcagagagggccacaggacaaagggagactggactgggggaagcaagctagcgaggagaagggggttcctggaagaggggacattggttctgggctttgaagcatgagtaggagcttctaaagcagatggagttgggagaagggagggtgcttatggccagatcacagcaagcattcagagaatcctatataatccacacatctctggatattgtcatgttatcagcaagaccctgcctccaaagataccttcactttcataccttcccttcctctccttataatgggaggaagaggccggatgcagcggctcatgcctgtaatcccagtactttgggaggccgaggcgggtggatcaccagaggtcaggagttcgagactagcctggccaacatggtgaaaccccatctctactgaaaatacaaaaaattagctgggcgtggtgacgggcacctgtaatcccaactactcgggaggccgaggcaggagaatcacttgaacctgggagctggaggttgcagtgagctgagatcgtgtcactgcactccagcctgggcaacaagaacgagactctgtctcaaaaaaaaaaaagaaaagaaaaaagaaagaaagaggccgggcgcggtggctcacgcctgtaattccagcactttgagaggccgaggcaggtggatcacgaggacaggagatcaagaccatcctggctaacatggtgaaaccccgtctccactaaaaatataaaaatttagccaggcgtggtggtgggcgcctgtagtcccagctactccggaggctgaggcaggacaatggtgtgaacccgggaggcgcagcatgcagtgaaccgagatcaagccagtgcactccagcctgggcaacagaatgagactcggtctcaataaaaaaaataaataaataaaaaataaaaaagaaagaaagaaaagaagaaagaaagaaaaaaaaggagggattcctcaatggggcagagcagagacaaacagctaatagtcacattttttctaaagggcagacaaaagatattttgcaaataactgaataccacacacactatccagattataaggccagttctccactcagaagccctcacctgtgacaccataccttcattagggcatgctgagcagcagccttgcagagaccatccttggtgggtctgaggtccccaagctgctagggactgtctctgagagagacatgagtccctaggtcatatgatgactaggaactcaatgaaggtggggtggggagacctagaactttcatcctgaccactcagttccctgtcggggtcccatcagggaataccctgggtttaggtttctgtgtggctctgagcatgttcctctcctctccctctctgtgccttggttattctatctgataagcaagaagcttgggacagacaaaatgtctgtccttggggccttggggctctgtgcatttacccttcagcctgggatcagccccgccctgtctgagcctcagtttccccatcagtaatttgatcgtgatggccgaggtgaccctgcaagctgtcctcacccaaacaatggggctcactagtaaaaggtgtggccatcaataatggatgtcctgttactacacaactggggccttggccccgatcacactgcagctgaaccctggccagcttgggtttcatagctccaagttcatgggtcggggcccctgggcaatggccccacaggccgagtgatgatgtgggatactcatctgtgcccatcgtgctgggtcacgccagggacctgcagcagccttgggccacctcctcacaccctcatcttaatgccaagcccacaacccagactgggctctggactttgcacctgggctcccagcctcaagtcccagtctcaggagaatctttatctttcattttgtttttctgaggcagagtctagctctgtcacccaggctggagcacagtggcgtgatctcggctcactgcaacctccacctcccaggttcaagcaattctcctgcctcagcctcttgagtagctgggattacaggcacccaccacctcgcccagctgatttttgtattattagcagagatggggtttcaccatgttggccaggctgatcttaaactcctgacctcaggtgatccacccaccttgtcctcccaaagtgctgggattacaggcatgagccaccgcgcccagcctcaggagaatctttctaacgtgctgatggtctctcccctgctcatgcatgctccatagctccctgccacccttgggagaaagcccaagctcatcagcctagagactgggacagtatgacaagatgtgacttgtcagcttctccatctctgcctctgtccactgaccacacctgccccccttccccatttgagtcccaacaaattggaaataccagttgggcatggtggctcacacctgtaatcccagcactttgggaggctgaggcagggggatcgcttgagcccaagggtttaagaccagcctgggcaacatagtgagagccccatctctataaaaaaatacaaaaatgaggtacatgtggtggctcgcaccagtggtcctagctactcgagaggctgaggtgggaggatcacctgaccttgggagatcgagcctgcaatgagccatgattgcaccactgcactccagcccaggcaatagagacagaccctgtctcaaaaaaaaagaaaagaaggaaggaaggaaggaagggagggagggagggagagagagagagaaaagagaaagaaagaaagaaagactacttacacacacacacacacacacacacacacacacacacacacacaccaaattgcaaatatcctccagcaatgaatagaaagttgtttttccagatcttctctcccttcctccctggactgacctcatgatctccttccttgtgaaaaatgtgcagtcctgtggagagaggtgttgtcttaacccgaaccctgcctctggggcctcctcccacggcctcctccctccaccccacactcacacagatggcctgatgctgccacacacagagcagaaccaggaacccaggcggacggtacacccagatgaaggcattctgttcccatttcccagaccacggaaccaaagttgtcaaacccactgaggacccatcctgcccccctctacctgatacgcttccagctgctcgtgtgtgaagactgtctgcttgttgcccatggtgtgaaccacagcccagacttggggatgcaccccaaaggctcccagcttcctcggggccacacgggttgccaggctgttgtgtaccagtgtctgggcaaatctccctgccctggctgtcacccacccacctacgccatcaccccctgcttgatgagactcaaattacagccaggctctctggacaacagcctgaatgtgtccatgggtaaggataagggctgtgggatgtcacagagaagacctcagtggggaggccacatctgccaccacaaggtgaggctggggttatggggcacactcaagagacaggcagggtatacagaagggctatgggcacactgcagctcaaatcccagctctctgcccactagctgtgtggccctgggcaagtcacctgacttctctgaacctcattcatgagatgaaaattacattatacctacctcatagggtcattctcaggatctgagatttaaaaaaaaaaaaaaaaggttttgactgggcaaggtggctcacacctgtaatcccagcactttgggagggccaggcaggcggatcacctgaggtcaggagttcaagaccagcctggccaacacggcaaaaccccatctctactaaaaatacaaaaattagcttggcattgtgacacatgcctgtaatcccagctactccagagactgaggcaggagaattgcttgaacccaggaggtggaggttgcagtgagccgagatcccgccattgcactccagactgggtgacagagtaagactccatctccaaaaaaaaaaaaaaggttttggctgggcgaggtggctcatacctgtaatcccagcactttaggaggacaaagcatgagattcacttgaggccaggagttcaagatcagcttgggcagcatggcaaggccctatctctactaaaaatacaaaaattagctggatgtggtggtgcatgcctgtggtcccagctactcaggaggctgaggtgggaggattgcttgagcccaggagtttgaggctgcagtgagccatgattgcatcactgcattgggaacataatggtgaacaagctagatgaagttctggggtgtgcattgacattattattttattacattttatttttttgagacagtctcactctgttgcccaggctggagtgcagtggtgtgatctcggttcactgcaatctctgcctcccaggttcaagtgattctcctgcctcagcatcccaggtagctgggaccacaggtgtccaccatgccaagctaattttttttgtattttttttttttgagacggagtctcgctctgtcacccagtctagggtgcagtggcgtgatctcggctcactgcaagctccacctcccgagttcaggccattctcctgcctcagcctcccgagtagctgggattattacaggcgcccaccaccacgcctggctaagttttgtatttttagtagagacagagtttcactatgttggccaggctggtctcgaactcctgacctcaggtgatccacccgcctcggcctcccaaagtgctggaattacatgtgtgagccacctcgcccggcccaaagggcagatctaatgtagcagctaccaactttattaaggcccagaatcctcttgggtggagaatctgagagtctaaatttcttagcctggccctccatgcccttctcactttgggtctcacctgtgttttctctacctggcctggactattgcaatgtttcccagcaggctttcctgcctcggcctcatcaagcatcctctgccaaatctgtgcagtcatcttgtaaaatgtgaccctgatcaggcttgaaagatgcctcaaggatgacttttttttttttttgagacagggtctcactctgtcacccaggctggagagcagtgatacaatcatggctcactgcagcgaccctccttcctcagcctcccaggtagctggcactagaggcacatgctgccacatccggctaatttttttttttttgtattttttgtggagacagggtctgtctatgttgcccaggctggtcttgaacacctggcctcaagtgatctacccaccttagcctcccaaagtgctgggattacaggcatgaaccaccatgcccagccatccaagaataactttcaaaaaataaacaatatcaagtgttggtgagggtatggagcaactggaatgctcatacattgctggtgttgatgcaaaatggtatagacactctggaaaataggttggctgggttttttttaaatagaattaaacttaaccttaccacaagattcagggcctggtatggtggctcatgcctgtaatcccagcactttgggaggccaaggcaagaggaccactttagcccaggagttggagaccagcctaggcaacatggtgaagccccatctctacaaaaatacaaaaattagccaggtttggtggtatccagctacttgggaggtttgcttgaggtagggaggtcgaggatgaagtgagctatgatcactccactgtactgcactccagcctgggagacagagtgagatcctgtctcaaaaaaaaaaaaaaaaaaagactcctgggtgtttacccaagggaaataaaaacctatgttcaactgagagtgacccctaatgtaaactatccactaaccactgtgggtgataatgatgtatcagtgtcagttcatcaattgtaacagactagctactgtcatgcacttgcatgtggaggatgttgattgtaggggaagctatacaagtatgaaagcagcaggtgtacgggaaatctctgtaccttctgatcaattttgctgtgaaactaagactgctctaaaaaaataaagtatagtgtaaaaaaaaaatttaaactaggttcacacaaaaacctgtcatgcccacagaatgggacaaatgctcagtgctcaagtcatttatataaaatggcataatatttgcatatagcctgtgcacatcttccatacactttatttatttatttatttatttttattttactttttcgagttggagtctggctctgtcacccaggctggagtgcagtggcgtaatctcagcccactgcaacctctgcctcctaggttcaagcaattctcctgcctcagcctccctagtagctgggattacaggtgcacaccactgtgtccagctaatttttatatttttagtagagacggggttttgccatgttggccaggctggtcacaaactcctgacctcaagtgatccggcccaccttggcctctcaaaatgctgggattacatgggccaccatgcccggccctccatagactttaaattatctctaaattatgtataatatctaatgaaatataaatgctacataaataattgttacacatttttatttgtattctttttattgttgtattatttttattttattggttccaggtattttcactccgtggtttattgaatccatggataaggaaactggatatgaagggctaactgtatttgtgaatcatatatctcataaggaactactattcagaatatataaagaactctcagggccgggcgcacgcctgtaatcccagcactttgggagaatgaggtgggtggatcacctgaggtcaggagttagagaccagcctggccaacatagtgaaaccctgtctctactaaaaatacaaaaaattagccaggtgtggtggtgggcgcctgtaatcccagctactcgggaggctgagacaggaaaatcgcttgaacctgggagggggaggttgcagtgagctgagatcgtgccactgcactccagcctgggcaacaagagcgagactctatctcgaaaaaaaccaaaaaacaaaacccacgataaaaactaagaactcttacatctcaaaactagaaagacaacccaaataaaaacattatgctgatcaaggtaacttttgcaaaaaagagaaaagaagaaaacaaaaacattatgttgagtgaaagaagctagagatgaacagtcccatatagtgtgattctatttacatgaaatgtgcacaccaccacacctggctaattttttaaatttttgtagagatgggatctcaccatgtcgttcagactcgtctctaccttctgagctcaactgatcctcccacctcaccctcctaagtagctgggaccacaggcaggtgccaccgcactcgctaattttttgtattttttttttattccacttgggtaaatatcgaggggtaggattaatggctcatattcagtatataagaaacttgccaaacttcttcctaaagaggctgcactagtttgctttctcaccatcagtgtttgtaggttctagttatttcacatcttctccagcagttactattttcagttttttatttacttttatattttaattaattaattaattaatttatttatttatttatttatttatttcttgagacagagtctcgctctgtcgcccaggctggagtgcagtggcgcaatctctgctcactgcaagctccgcctcccaggttcccaccattctcctgcctcagcctcccgagtagctaggactacaggcgcccaccaccacacccggctaattttttatatttttagcagagatggggtttcaccgtgttagccaggatggtctcgatctcctgacctcgtgatctgcattttttgtattttttgtagagatgaggtctcaatatgttgctcaagctgttctcaaacttttgggctcaagtgatcctcttgcctcagcctcccaaagtgtttggattgcacaccaggccaggtgtgagtcagcctggcatagaaaatttacacccagcctgacatagaaaaattaattttggccaggcgaggtggctcacacctgtaatcccagcattttgggaggccaaggtgggtggatcacctgaggtcaggagttcgagaccaacctggccaacacggagaaaccctgtctctactaaaaatatataaacgagccaggcgtagtggcacatgcctgtaatcctagctactctggaggctgaagcaggagaatcacttgaacccaggaggcggaggttatggtgagctgagatcgcgccacggcactccagcctgggtgacagagtgagactccgtctcaaaaaaaccaaaccaaaccaaaacaacaacaacaacaacaaaagacaacaagtgttgtcaggggtgtggagaaattggaacacttacatagttggtgggaatgcaaaatggtgtagctgctatggaaaacagtatgaaggttcaaaaaaaattaaaactatcagccgggcacagcagctcacacctgtattcctagcactttgggaagccaaggcgggtggatcacttgatctcaggagttcaagaccagcctgggaaacatgatgaaactttgtctttacaaaaaatacaaaatctagacagatgtggtggcatgctctatggtaccagctattgggaggctgaggtgggagtattgcttgagcccaggaggttgaggctgcagtgagtcatgattgtgccactgtactccaacctgggcaacagaccctgtctctaaaaacagaagaggaagaagaagaaggcaaatcacacattgtgttcttaccacaatgtcttagggggttttttgtttgttttttgagatgaagtttcgctcttgtcgcccaggctggagtgcaatagcgtgatctcagctcattgcaacctccacctaccgggttcaagtgattctcccgcctcagcctcctgagtagctgagattacaggcgcccgccaccacactcggctaatttttatatttttagtagagacggggtttcaccatgttgatcaggctggtcttgaactcctgacctcaggtgatccacccgcctcggcttcccaaagtgctgggattacaggtgtgagccacctcgcccagactttaccattatttttttgttccgcttcccaaagtgttgggattacaggcatgagccaccacacccagcctttatcacaattttttgttaatgtagtttaaatatgcagctaccgtaattacacttttgggcaatttcaaaggaatggaaacttatgttcacataaaaatctgtaacagatgttttatcttaataaccccaaactggaaacaacccacatgtgaatgtttaagcaaatggatacgtccataccatagaaaattactggagaatagaaaaggtaaatattacgacttggatgaacttctagggcattatgctgagtggaaaacaaaccaatcctagcaggttacatattgtatgattccatttatatcacattctttttttttttttgagacggagtctcgctctgtcgcccaggctggagtgcagtggcgtgatctccgctcactgcaagctccgccttccaggttcacgccattctctttcctcagcctcccgagtagctgggactacaggtgcccgccaccacgcccggctaatttttttgtatttttcttagtagagacggggtttcagcgtgttagccaagatggtctcgatctcctaacctcgtgttccacccacctcggcctcccaaagttctgggattacaggcgtgagccaccgtgcctggctatatcacattcttaaaatgaatgacaacatcagagaaatagagaacagatccctgtttgccagctgtgcaggaatggaggtgaggggataagtgtgtatggctacaaaagagcaacaagaggaatttttttttttaaagacagggtctcactctgtcgcctaggctcgagtgcagtggtgccatcatagctcactgcagccccaaactccctggctgaagcaatcctcctgcctcagcctcttgagtagctaggactacaagcacctgccaccaaacccagctaacttttgtattttgggaggagacagggtttcaccatgttgcccaggctggtgttgaactccttggctcaagggatctgcccgcttcagactcccaaagtgctgggattacagacgtgaaccaccatgcctcgcctctgtttatttcttaaaactgcatgtgagccttcaattatttcaaattaaaagtttaattaaaaaaattacttcccctccatttaaacacattttgtttcacattttaatacctccaaaatcaagatgcatctcgaaagtactgttggagcattctcattgcctatacatgcacacccattaaaagcatccgcttcaaaactcacagaatggaggcagaggctaggaagaaaatcccctaggatgtgaggaatgggggtgtggaatcccatgcgcttagctacattcctgaagtgggagctcactcagcaagcctgacattattgcaaagctggctagaaagtcaagccccaccctcacttaattcctttacagattctttcttttccctttttttttttttggagatggagtcttgcagtcttgctctgtcactcaggctagagtacagtagtgtgacctcggctcactgcaacttccgcctcccaagttcaggtgattctcctgcctcagcctcccgagtagctgggattacaggcgcctgccaccacgcctggctaatttttgtattttcagtagacacagagtttcgccatgttggccaagctgttcttgaactcctgacctcaggggaaccacccgcctcagcatcccaaggtgctgggattacaggcatgagccaccatgcccagcctctttcttttcctaataaacttttagttttgaaataattttaaatttacattaaaattgcaaggatgggctgggcgcagtggctcacacctgtaatccctgaactttgggaggcaaaggcaggcagatcacttgaggtcaggagttcgagaccagcctggccaacatggagaaaccccatttctactaaaaatacaaaaaattagccatacgtggtggtatgtgcctgtagtcccagctactcgggaggctgaggcaggagaatcgcttgaacctgggaggcagaggttgtagtaagcgagatcgcgctgctgcactccggcctggatgacagagcaagactctgtctcaaaaaaaaaaaaaaaaaatagccggatgtggtggcacatgtgtgtaatcccacctactgcaggggctgaggcaggagaattgcctgaacctgggaggtcgaggttgcagtgagccaagatcgtgccactgcactccagcctgggtgacagagtgagactccatttcaataaacaaattaactaatttaatttaagtgcaaggatgatacagacagctcccataacccttttgacctgcttcctctaatggttttttttttttgttatttatttatttatttatttttgagatgtagtctcaccgtgtcacccacgctggagtgaaatagcaaatggcaaaatctcggctcactgcaacctctgcctcctgggttcaagcgattctcctgcctcagcctacccagtagctggggctacaggtgtgcgtcactacgcctggctaatttttgtattttcagtagaggcgcagtttcatcatgttggccaggctagtctcaaactcctgacttcaaatgatccacccgcctcggctcccaaagtgctgggattacaggtgtgagccactgagcccggctctaatgttaacatcttacacaaccacagcatatttagcactactaagaatttaacattggcacgttactatttctttttctttttttgtagtttttttttaatttgtattcaagactcaacataatcattttcttttcctttttttttttttttttttttttgagatagggtcttgctctagtgcccaagctagagtgcatcaatcaagatcctaaatcactgcaccctcgaacacctacacccaggctcaagtgatcctcctgccttagcctcccgaggagctgagaccgcaggtgtgccccgccacatccggctaatttttttcttttcttttttttttttttttttttttttgagacggagtcttgctctgtcgccagggcggagtgcagtggcacgatctccgctcactgcaacctccgcctcccgggttcaagtgattctccgcctcaagcctcctgagcagctgggattacaggctcgcgccaccacgcccggctaattttttttatttttagtagagacggggtttcaccatgttggccaagatggtctccatctcctgacctcgtgagccgcccgcctcggcctcccaaagtgctgggattacaggtgtgagccaccgcgcccggcaaaaagatcgccttgcttttgacacaaaagtgctggcagcccccatcccctggtaccagaagcccctctgcacagtcttttccaggtgtggacggataattaggcagtgacttgctgccccctgcaggtaagactgagaaaggcagcccctgtgccctcctttttcttgtgtccggtagatttggggacgtttgcttctctcttctccacctcctttgccttctccccactaccccaccccccgccagcaattaaaaaaaaaaagccaccctggcacaatttggacaaaatctatgagaaataaaacgtgcaaacgtgcataaccttggacctagtaattccattggttgcaaaagtcagccaagatttgtgggcacggattgtgttcattcatttatctagggcagtattagggctgtttctaatttgttggctattacaaataaatctgcagtgaacattcatttacacaattttatatgggtctatactttcatttcacttgggttaaaacgtaggaatctaattcttttgtcatagtataagtgaatgcttaatcttttaaagaactgtcagactgatttctaaactgtttatgccattttacattcacaacagcagcacgtttgagttccagtttcaacacatcttcacagatacttggtaggcacagcctttttaaatttttcccataatagtttttttttttactaggtttttgatacagagggaaatagagaagaaaccaaaaattccgatagtcctctgctgacattaaaaagatatattcaagggccgggcacggtggctcacgcctgtaatcccagcactttgggaggctgaggcaggcggatcacctgagttcaggagttcgaaaccagcctggacaacatggcaaaaccctatctctactaaaaatacaaaaattagcggggcatggtggtgggcgcctgtaatcccagctactcaggaggctgaagcaggagaatctcttgaacctgggaggtggaagttgcagtgagccaaaatcgtgccactgcattccagcctgggcaacagagcgagactctgtctcaaaaaaaaaaaaaaagatatatgcatgtacacatcgtatgtaagaaaaccgcacagtactgaaaggatgaaaagaaagaaagaaagggccaggggtggtggctcacgcctgtaattctaatgcttcaggaggactgcttgaggacaggagtttgagaccaacctggacaacacagcaataccctatctctattgattttttttttttttttttttttttgagacggagtctttgtctgttgaccaggctggagtgcagtggtgcgattttggctcactgcaacctccgactcccgggttcaagcgcttctcctgcctcagcctaccaagtagctgagactacaagcgcaggctactatgcccagctaatttttgctttttgtgttttgttttgttttgttttagtagatacagggtttcgccatgttggccacgctggtttccaacacctgacctcacgtgaaccgcctaccttggtctcccaaagtgctgatttaaatatatatgtactttttttttgagatggagtctctctctgtcgcccaggctggagtgcagtggtgtgatttcagctcactgcaacctccgcctcccgggttcaagcgattctcctgcctcagcctcccgagtagctgagactacaggcgcccgccaccacgcccaggtaattttttgtatttttagtagagacggggtttcaccgtgttagccagaatggtctccatctcctgacctcgtgatccgcccacctcgttttcccaaagtgctgggattacaggcgtgagccaccgcgcccggcataaaatagatttttaattgttttaacataccaccaaccttgtcacatgatattgtcatttacctaaagctgaaaaattaatgaatactgattaggtttacaaaattaggttcagctatccagtgaacgctcaaaatatggcaataaaagagaacgggggtggtggggcgtggctcaggcctgtgatccctgcgctttggaaggccgaagcaggaggatcacttgaacccacgagttcgagaccagcctggacaacacagcgagaccccatctcgacaaaaaaatttaaatgaaaatattagccgcgctcagtggcgcccgtctgcagtctgctactggggaggctgaggcgggaggatctcttgagcccaagggttcaaggctgcagtgagccacgatcgcgccactccactccagcctaggtgacagaccaagatcgtgtctctaaaaaagaaaaaaaaatcaaggagagagaacaggtcacccaaaagtgcgcaaaacgctcaaaaaggggttgggtttccagcaccctgtgtgaagaatgggagaccggaagtgggcgccaaattcggaagtgtggcagcagataggaatcgaagggcactcattcgcttggctctctgtcccgcccactacccggaagtgtggcccgggtccagaaccaagagcgcatgctcaccttgtagctcagccaatcaaagagaagcgaggcggccattcgggcggaaatagtgtttgcaaacaggaagtgtggcactccagctaccgaagcactggagagtgtcatggaggcctacgagcaggtccaaaagggacccctgaagctgaaaggcgtcgcagagctgggagtgaccaagcggtgaggcccgagggcccgcgggattccgtcttcatcccccttagaccttttctcgggacccctggccctgatcctccgacccgccgcctcctcatgtctttttccaggaagaagaaaaagaaggacaaagacaaagcgaaactcctggaagcaatgggaacgagcaaaaagaacgaggaggagaagcggcgcggcctggacaagcggaccccggcccaggcggccttcgagaaaatgcaggagaagcgggtgagcagaagcagaaggcggcggggaggcgggaacacccggcgccgggagactggaaattggggtcagggctgggacgctccgagggcaggggagcggtcagaggagaccttaattacggggagaggatgctgtacgtgagtgagagaagagtcgccctctgccgggggagctccaaggatgagaagaccccgctggcccgagtgggcagcagaggggagagctagaactggcgttgaaaggaggccagagctggagacccgggtttggattccagtgctgtggcttatttgccctgcgacactaggccagtgactttcttatttccgtgcctcaagtttcctcttctgtacgagtcagggtagtaacttattctaagagggttgggaacttgagaggaagtcatgaaagtaaaaagcagtgcatacatgttcagtggatgccagctcttgatattaaatggccatgctcgccgctcgaagtcaccacaaagtttgtttccaagacaactttgtttggcagattcaaacatgctgtattttttaaaaaattagttatttttggcggggtcagagcactgcagcctctgcctccggggttcaagcaattctcctgcctcagcctcccgagtagctgggattgcaggcgcccgccaccacacctggctaattttggtatttttcgtagagatgcggtttcaccatgttggccaggctgatctcgaacttctgatctcaagtgatccgcccgcctcagcttcccaaagtgctgggattacaggcgtgagccaccgcacccagtctcagctgttgatattgaatggccatgcccatgacgactttgtttgtattgtattataaggctccgataaattattttttcttaacaccataaatgtgtgcagtggagaacagaagagttcacagtaagacagaaactgggtccattatgctggggagagggaataatcagtgtaggtcagtgattctcacctgggggtagtctccacccccctaaactcccaccccgaagcacatgtggcaatgtctggaaacatttttggttctcaactgggttggggtggggactactggcaactagtggctagaggccagggatgacaccacacaccctgcgatacacaggacagcctgccgcagcaaagagtgatccggctccaaatgtcagtagcactgaggctgagaaaccctaaccctggtctaggtgattctgtacggtgacactggggaaaatggaccttggggacaattaactccttactcccagatctaattcaggcatacagaaaacacatggatgcactacctctggcatgacagacctgagtttgactctgcctctaccacaaattagtggtgtgaccctgggcaagccggctacctattacttaaagtagcactaaagtctgcctcacagggttgtggtaaggatttaacaagtcaggcgggcggatcacgaagtcaggagttcaagaccagcctggccaacatggtgaaaccctgtctctactaaaaatacaaaaattagccgggcatggtggcacacacctgtaatcccagctacttgggaggctgaggcaggaggattgcttgaaccagtacccgggaggcagaggttgcagcgagccgagatcacgtcactgcactccaggctggcaacagagtgagactccgtctcagtgagactcagtctggctctgtcaccgaggctggaatgcagtggctcgatctcggctcactgcaacctccgcctccggggttcaagcgattctcctgcctcagcctcctgagtagctgggattacaggcgcctgccacgacgcccatctaatttttttgtatttttagtagagatggagttccaccacgttagccaggctgttcttgaacccctgacctcaggtgatccgcctgcttcagcctcccaaattgctgggattacaggcgtgagccaccacgcccggcctttttttaattttttgaaaaagcctcgctctgttgtccaggctggagtgcattggtatgatctcagctcactgcaacctctgcctcctgggttcaagcgattctcctgccttagcctcctgagtagctgggactacaggcgcccaccaccatgcccagctaatttttgtatttttagtagagacggggtttcaccatgttggccaggctggtctcgctctcctgacctcaagtgattcacccgcctcagcctcccaaagtgctgggattacaggcgtgaaccaccatgcctggccaagtaaatgcatttctttcccttctaaccctgaggttgtagtcagaggcagggctgagattttattgctggaagccagaatgagacttatgcgagacttaggcagctattaagagactaataatgggagctcagagtagagcagtcgtgatggagccagtggaaggtaacaggtttggaataggttttcaaggatgaattcagggttagctgttgggttggatgtaagctgggaaagaaagaagagtcaaggatgaccaagactttgggctgggcagtttgatgaatgaaggtgctgtttactggggtgggaaggattgcaggtaaagcaggttttctggagtgggagttgagggagggggaaccaaagctatagttttaaagaaggtaaatgcagtgccccagtagaaatccaagtggagtcagccaggcacagtggctcatgcctgtaatcccaacattttgggaggccgatgtgggaagatcagttgagcccaggagttcaggactagcctgggcaacatagcgataccctgtctcttcaaaaactaaaatagtagctgggtgtcacgcctgtgggcagagcccagccaggtgcctggcattgtgtggcagctggacaagtcagtgtggcttctcacagggagacacaggctttggctgggctcacagcagcaggaagagggacagagatgggcagggcactcgccttagagggagaatcagccaggtgagggctgactggacacaggaggtgagggaatgaaggagaagggggggacagagaggagcagccaggtggcccctaccaataatatctcatgatgctctgggttgactgggcttagcagggtctgacctcacttggagtctggtgtggtcagatggcagctgggcctggagtctctgaaggtgcagctgggctgcagcatctaagatggctttgtcgccatatagctggtgcctcagtgcttctttttttttttttttttttttttgagacagtctcgttctgttgcccaggctggagtgcaatggcaagatctcagctcactgtaacctccacctcccgggttcaagctattctcctgcctcagcctcccaagtagccgggactacaggcgcatgccaccacacctggctaatttttgtatttttagtagagacggggtttcaccatgttggccaggctggtctcaaactcctggcctcaagtgatcctcccaccttggcctcccaaagtgctgagattacagacatgagccgccatgccccacctctcagtgcttctttcgtggcctcttccttcatgtcatctcatcttccaggtcctttctttccagcagggccatcagacttcctgcacagcaactggcttccaagggcacaaagctaatgctgccaggtcttatgcatggacccagaactggtactgtgttccttcgagttaactgagtccacggccaggtcagagtcagtgtggcatggggactgcacaagggatgaatcataggcagcacagttataggggccaccaaagagtgggccacagtcacccagccaggaagtgtggagccaggtgtggcctcagatctgtctggctttatatcccacactccaactcttttttttttttttttttttttttttgacagggtctctctctctgtcacccaggctggagtgcattggtgtgatcatagctcactgcagcctcaacctcctgggtcaagcagtcctctcaccccagcctcttgagtagctgggaccacaggtgtgcaccaccaaaatcagctgattttcttgtagagttggggtctccttatgttgcccaggctagtcttgaactcctgggctcaagctatcctcctgccttagcctcccaaagtgctgggattacaggcatgagccaccgcgcccagcccacactcccagctgctaccagatactgacctttccaggtgtcattgagtgtttgaagtgaggatcagagcaggtcatggtgcaggaggcatatttcagaataaccctggggatggtgatcctggtcttgtagccctaacatcaggatgggaagtgtcacttgagcacctgctctatgtcagaccctttacctctctctttctcatcattcctgaaacccgctctgggactttgttttcctccaaactgggagtgctaacagcctcctcaggatgcaggaagcatgccgacagctcccagcagagtctgctcatgggtacgcgctcaggcattgctggttcatttcctgccactcacgaagctggcaagtgacctgggttccctgttggaccagcctgggtggagttgagggagggggacaaggcacagagcctgaaacctccagctgttctaaatgtgagagccagtctggccaggctccatcttccaccccatgccagcctgggctgtgttgagcctgtaaactcacctccatgtctcttctctctccagcaaatggaaaggatcctaaagaaggcatccaaaacccacaagcagagagtggaggtgagtcgccgtgtccagtgggggagactgagccattcagggtcccagctgggcccagaggctatcagctggcagagggagctgttggcatgttgacgagaagggaagtttacctaatagaagtgacacttccccagggttattcaaaggggagcccagggttcaggagtctgtaagacctggcagggtgagtttgagaggagggggctcaggagagataggatgtgggagaggtggggctgggcagtgccacttctccccagtaccccacttgggtctgcgctgacaccggccttctactccacctccccaggacttcaacagacacctggacacactcacggagcattacgacattcccaaagtcagctggacgaagtagccgcctgcccccagtatggagcagcatcgagggttcgcaaaaggccacactggggttgtgtgtgtttcctttggtatattctggaaacatggctacacacacccttgcatcttctgctacagactgcttttcgaagctgtgtaccctcattctggaacttgattaaagtaagatcgtccttgtactcagtttaggcttcttggcaacatacagaagatacacccttttcgtttggatggaaagtttctaagtttatccagaggtaaagcccattgtgtgtctgtgtcatgtaaaaatgttttcacccgagttgcatgtaacgctctgaggccagccagctgtcttctcctggatgagacagactccagagggtaaggagctagcgccatggtggcctgcagtatgcagagccccgcaggacccagcgtgggcgcccttccaagcttcctctagctttgggcctatgctgtcccctgcaggccctagggaagccacttgcaactatgcggccttcagacttcctcctcagccacctggccactgagacagcatagcctgggtaacggaacagccacctaaggcaagaatggaacggacacaccttgctcctttctgagcccgtttcccaaaaccccccttccaggtgcttctaatgggtgttgccatagcagacgctgctaatgcatcacagcattctttgaaatggaaccagacacagcctgcctctcaatcctcagctgggggctcctagcagcctcttgtatttactcagagttgacacatcacacagatcctgtttggcattcctaccttacggacgtctcaggggtgacaggaccagggcagagccccggtacaaacagacaaggctgcagtcaaatgggagggtccaggtgtccgtgttggagggctgggatcttgtagggcctgtgcgtcctggctgaggatcaaaccacatatgttattgggagaaacgatttctgttgacgtagatattgaaagaataatgaaggcagaagagaaaaacgaagtgtggaatttggggttgtcctgtgtaaattacacaataaagcaaaagtcagttattgtaagtctgagtgtcttctttttttttttcccagacagagtttcactctcttgcccaggctggagtgcagtggcataatcttggctcactgcaacctccacttcccaggttcaagtgattctcctgcctcagcctcccaagtagctgggactacaggcaaccgcgactacgcctggctaatttttgtatttttagttagaaacgggatttttccatattggccaggctgatctcgaactcctgacctcaagtgatctgccgcctcagcctcccaaagtgctgagtgtcctcttataggctgtttgtcaccaaaatgtcttttggatttgtggcacagaaaaatattcatactggaaaacggcaactcaggtggaaaaatttcgatggcacatctgttcccgcctatggttcacacctaagagagatgacacacactctcattagcagtggcttttgccagtgattctcccatggcctggtggaaagacagtttcagaccttttccttccacaagctagcagcaggagtctgcattatgtactactgtggaaaccctttattagtatagtggaaaggtagttatttcagctctttccctgcataacaaacggctccaaaaggcagtggcttaaaacaacaaaaatgtatttttattttattttattttattttattttatttttttgagatggagtcttgctctgttgcccaggctgcagtgcaatgacgcgatctcggctccctgcaacctccacctcccgggttcaagcaattctcctgcctcagcctcccaagtagctgggattataggtgcgtgccaccacgcccagctaatttttgtatttttagtagcaacagggtttcaccgttttggccgggatggtttcgatctcttgacctcttgatccacctgcctcagcctcccaaagtgctaggattataggtgtgagccaccacacccggccaaaactttatttattatcacaactctggcttgactgtgctaggctggaggattctgttccatggagtgtggttcagttcactcatttagttgtgttggctttcccggggccagaaagtccagggtggcatctcaccctccaggatctccctccacaaagcctatttctttattattgttgttattattattattatatttatttatttattttgagacagagtctcgctgtgtcgctcaggctggagtgcagtggtgcgatctcagctcactgcaacctccgcctccctggttcaagtgactctcctgcctcagcctcctgagtagctggaattgcaggcacccaccaccacgcccggctaatttttgtatgttagtaaagacagggttttaccatgttggccaggctgctctcgaactcctgacctcaagtgagtcgcctgcctcagcctcccaaagtgctgggattacagacatcagccaccacgcccggcctacatagcctatttcagcggccaaaacaagccacctagccaaacccggagtctggcagggaactccacaagggcatgaacactaggaggtgtggtttactgggatccaatacccttacagtccaccaccgctgtcctcaaatttacattagaatcacctggggagcattaaaaaccgccaagttctggtgccaggcacagtgcgacgtatgcaaatgtaatcccagctgctcaggaggctgaggctggagggttgcctgagcccaggagttcaaagcgagcctggagaacagagattcttattgtgtgtagggagtgttgtggcaggccaggtctcactaatgcaggcctccggccttcataatgactgtttaagtactgactaagtggttaattttttttttttttttggagatggcatttcgctcattgcccaggctggagtgcattggtgcgatctcggctcactgcaactctgcctcccgggttcaagcaattctcctgcctctcagcctctggagtagctgggattccaggcatgcaccaccgtgcccggctaatttttgtatttctagtagagacagggtttcggtatgttggccaggctggtctcaaactctcctgacctcaggtgatccacctgcctcggcctcccaaagtgctgcgattacaggcgtgaaccaccatgcccagccaagagaggcttttgatactaattgcccagtgattaagctctagaaggaatccgatgagatgtcaggactattattattaccattattattattttgagatggggtctcattctcttgcccaggctggagtgcagtggtgtgatcacggctcactgcagctttgacctcccaggctgaagtgatcctcccacctcgacctcctgagtagctgggatcacaagtgtacatcaccatacccagctgatttatttatctctttgtagagatagggtctccctatgttgcccaggtctcaaactactggcctcaacctcaagtgatcctcctgcctcggcctcccaaagtgttgggattgtgggtgtcagccaccaagcccggccacagctgtgacttcccactgctcaggaagaacatcagggtctgttcaccaagagttaacagaaatagacgcgatatgtaacaaaccctgttggacctagtctcatattttgccccatttattgtaatgttttagagatcttactctgttgcccaggctggagtacagtgatgccactatagctcactgcagccttgtcaacctcccaggttcaagtgattcttctgtttcagcctcccaagtagctgggactacaagtgtgtgccaccacactcagctaatttttgtattttttgtagagatggggtttcatcatgttccccaggctagtctgaaactcctgggctcaagtgatcctcctgtctctgtctcccaaagtgctgggattacaggcatgagccatagaaccaagcaactttttttttttttttatttgagactcagtctcaaaaagataaaataaaaaaagaaagaaagatcatacctattatgatacaccagggtttctcaaattttgtttcctattagcatcatctggggagcttggaaaaaaatcccaataaccaggctgggcgcagtggctcatgcctttaatcccagcactttgggaggccaaggcgagcagatcacttgagccgaggtgtttgagaccagcctgggcaacatggggaaaccccatctgtacaaaaatcgcaaaattaagcctggccaacatagtgaaaccccatctttactaaaaatacaaaaactgatctgggcctggtggcacacatctgtagtcccagctactcaggaggctaaggttggaggatcgcttgaacccaggaggcagaagttgcaatgagctgctgagattgcaccactgcactccggcctgggtgacagagcgagaccctgtttcaaaaaaaaaaacaaaaaaccagaattagctggccttgatggtgtgcatctgtagtcccagctgagccaaggaggtgaaggttgcagtgagccgagattgcaccagtgcactccagcctggtgacaggataagaccgtgcctcaaaaaaaaaaaaaaagaaaggaaaagaaggccaggcgcggtgactcacacctgtaatcccagcactttgggaggtggggcgggcggatcacaaggtcaagagatcaagaccatcctagccaacatggtgaaaccccgtctctactaaaaatacaaaaattagctgggcatggtggcaggcacctatagttccagctacttgggaggctgaggcaggagaatcacttgaacctggaaggcagaggttgcagtgagccgagatcgtgtcactgcatgccagcctggtgacagagtgagactctgtctcaaaaaaaaaattaaaaaaaagaaaaatcccaataaccaaaccctggcccagaccaattaaaacaaaatctctatacatggctttcaggcctcagtggttcttattgtgtgtgttgtattgggggggcttttgagacccccactcctaacctattcccagaccaaactgagggttgggcttctatatctcacagcccaataatgagacacagatgaactagggaggaagagagtttttatttctgtaactggttacagggagaaggcctggaaaatatcaccagaccaacccaaaattacaaagtcttccagagctcatataccttctaagctatatgtctacgtgtaggtgtgcattcatctaaagacgtaagtaagttatagtcttttaacccataactaagatctgagtcctgaagaccttcctctggagcctcagtaaatttacttaatctaagtgggtccaggtgctggggtgattacccttatcttatctcctgctaaatcatggaggtttgggggagttccttcaaaccccaataaacttgtttgtggaggcctgaggagtttcttcagaccgccaataaagcttgtttaatcctaaaagggtcctgttaagaattccttcattatcttgtcatgcttcaaggcccaggaaaggcctaggcacaactctgggtgggcttttgttacatcccagcctttgtataagggcactggctctcttatcttttaatatttaacttaacccttgtaatcccagcactttgggaggccgaggtgggtggatcacgtgaggtcaggagtttgagacaagcctggccaacatggtgaaaccacgtctctactaaaaatacaaaaattagctaggtgtggtggcacatgcctgtaatcccagccacttgagaggctgacacacaagagaatcacttgaacccaggaggcagaggttgcagtgagccgagatcatgccattgcactccagcctgggtgacagagtgagactccatctcaaaaaaaaaaaaaaaaaaaaaagcaaacaacaaaaaccctctcttggctgcttgctctgtgccttgagcaagaatccttccagcccaggagtcacttagcagtcttcaaacattctagtttgcttctctagagtttcggtcacatttctttcctaagcaaaacactatataattaccgagttgcaaaaatcatctttccaaacgccaaaacggagataagacagaaaataaaagatgtgagaggcaggcatcctgggtaaatcactctggtattgcagggttgggatccccagggtactatgatggctaactggaacagaatgcaggcatttctccaaagcccaagagttcataaaagcaaattaaatatgactcaatggattaatcaagggccaccagttgcattactgattactaactttgcagaaatgaaacacggtatgttgggtcaaggttcagtgaggctggttttcataacattccaggcaataaacaggcacactcattcattgataaatgttgacaatgacaggtggtgactgttgataaggtttgattgccattcagaaagtttgtttgacctctttccaagtaaccacgaccttacctctctcttttgagcttatcacaattggtgactgtacacttgtttcatagacttccccaccagactgtgagctccatagggctgggccccaggtcggtttcaccaccaggctctctcgcctaactcggcccacgggaggccgtttccagctgctctggctccatagctcagcctggcagcggccactgggtgccctgatttggtcggccccgccccaccgggccttacttccgggatgcttctggcgggagcaagaaacatggttacatacgacgtaatgcgcctgcgcacagtccgtcctgcgcctgcgcattcctgacagcacctcccggaccggacataacggtccccgcgcggctccccgaaccggaagtggaggtgagctgtcgcgggcggcgcccggccttgctcaacgcccagcagtccccaccgtcgctgccgccgccaccgccctcggccgctgccgaggcctcctgcagccatcatgtccgccagcgccgtctacgtgctggacctgaagggcaaggtactgagggctccccaccctccctgttgccaggcaaccggcaggggcctccgcccgcggggacccaccctgttgctaggtaaccggcttatgagccccatcctggtgtgaggcagagaggccggtagacctcacctgagagccccatcctgtttctgggtaaccgggcgggggtcttaagtgggtaatccccgccctgttgctacgtaacgcggtgggctgcagccaccgcgttgccaggtaactgactgcaccgccctctgctccccggcgccggggccgggggctcgggcctcggtggaggacccagaagcggggccgcagccggcctcggagccaggcagggcgtccaggggctgcgcgacccttggccgggggtggcgaggcgtggcggggactgggtgctctcgagccagtcccgccttctcagggcgttacagcttctgtttatcgtgcactttctctcagtaggaatttctccacgttcattgtgatagtgagttacaaggattaggtgaggtgagtggtgatcacgagtgccgttttatagagggagaaactgaggcatggagaggtgaagcaacctgaccaaggtcacaatggtcacagagaagtagcaagtctaggagtccgatccagaatcattcgtttattcagctgatatctggggagcacctactaatgccgggcagggtactaagcctggggtcgatttgtgtttagcaaaaaacagtccctttttttttgttttgtttttgagatagtgtcatgctcagtcgtccagtctggagtgtagtggtgcaatctccactcactgcaacctccgcctcccgggttcaagcaattttcctgcctcagcctcccaagtagctgggattacaggcacctgccactacgccgagctaaattttgtatttttagtagaggcagggtttcaccatgttgaccaggctggtctcgaactcttgacctcgagtgatccacctgtcttagcctcccaaagtgctgggattacaggtgtgagtcatgtgccagggctcaacaatctgtgttcttacggtgttcacaggctggtaggggagatggatacccatctccaaaaacacaaataaatgtcaattgcagtggtgttgaggggcgagtgtgttatacagacagtcagcctcagcccgaggatgagagagggtttccctgaggaggggtgacaaatggaccagagacaccagggagctggacataaactagaacccaggcatcttccccagaggatctgagaaaactttaagaagggattgtccccaccttttagaaatggtcctctgccttctcctaagtccatcccaggtgcaaggcaggtggctgcctggcctgttgcatgtggaagcaacaagaaccggtccaacaatgtgaagcccaacattgatcagtgagagaaacaaacatgggtgtcaggtcctaggtgaggcgggcaggggtgagccctaaagcagctgagagtgaagaggtgaaatggctgccccttcccgccccaccccacccccagcactttcctgaagtcccttgagtgggtgcctgctctggaagccacccaaagtcaacaactggtgagacccagtgctgggcttccctcccccgccttcttggaaggagggaagacacccgtcttagagcacgccaggggctgggtggtgcggtggaatgagtcctggtggaatgagtcttgcttccaccctggccactgcctccccagaggtgccagtgggctgcctgtcttggcttgcttattccttcagcaaacatttcatgagcacctagcatgcaccctgccctatgccgggcatagggtgtccattggcgccatggctgtggtgttaggggtgagctcaaaacccatccctgctgctcagctgtgtgacctgggacaggcaccttctcctgtctgagcctcactttcctcactggtcaaaagaggcttttatggagttattgtgcagatttgctgagcagatgcatgagacaggctcagcaccacccatggtccatgttagctctcccaggcctctcggtctagcaggggagtcacctagaagcagagacattaccacacagttggatccaggcagccacaggggcaggaacaaggtcccaagtcctgcagttgctcaacctcatctttagccagtggaagggggaggtggttatgaaaggctccctgaagagggcgacgctggaagtaggtttggaaggcacgatcatgtggaaaagaggtgttgcaaggggcagcctgctggggctgccaagccagaagtcctggctaatgctgagatgggagagagggaccaaggggaccacttcagttccaaccaggagccaccgtgaggagaccgtagcccagagaggcatgatcagacctgcctttcagaaagctccccaaggcagccgtgggcttccttcccttcctctgcaaccatgatgccctttcttattccacgacccacggacctcctgtttccaaagtcagcctcgtgagccgactgcatttaatcaacaataaagcacactgagaaattcatggccacgtgtctggtcaccgaggacaccagcgtggccacactgggctgggaggaagctgtcctagtaggaagcttctccgctttatctaactggcttctcagcagcttctgacaccactaaccacctcctcttcagtgctcccttccgcttccaggaggctgcgctctggggggtttcctcctgtttcttgcactgcctactttcctccttttctgccctccccagggctgtggagcggctcaggcctacgcgtgcctccccatgctgtcactcttcccaggtgggctttgactcatgtccatgggccagtgactctcaattttgttcacagcatttctctggagatctagtggcctctgagacaccagagaggtcccgccgccaccataaattcagcattcttctaaatgcactccctgtacctgctctctttccatttcagtgatgccatcacccattcagccatctgcacaagagacctggacgttatcctcgcctcctttgtctcctcacccctgttttcactccacaaatgtttactgagcacctactatggtccaggcccctttctgggtgctggaaaacagctgtgaatgagacaggagtagttgctgttctcaggggatgtcagacagtaaaggaggatagaaataaatgtttaatgcaccaggtgatagggataaagcaggggtcagggttcagagggatgggacatgatctcagccagagcaagcagggaggatttcttttttttttttttttttttttttttttgagatggagttacgttctgtcagccaagctggagtgcaatggcacaatctcggctcactgcaacctctgcctcccaggttcaagtgattctcctgcctcagcctcccaagtagctgggactacaggcatgcaccaccacgcctggctaattttgtatttttagtagagacagggtttcaccatattggtcaggctggtctcaaactcctgacttcagatgatccgcctgcctcagcctcccaaagtgctgggattacaggcgtgagccaccgcgcccagctgggaggacttcctagaggaggtgttatttgagctgaggcttgagaaatgagaagagccaggtcagggcaaaggcccgaggtgggaacagatgtggatcactcagagaccagctaaggggccaggctggagcagagtgaaccagggcagcgcaggcagagaggcgtcagaggggctgtgaggagccagaccacgctggtccttgggagccatggggacgggcttgggctttgttctcagtgccggggaggctggggtaagtggcagttcagcagtgggggagagaccccgtctggcttctgtgtaggaagagccctgtcaccctttgtgaggaaggacctggggggtcaagagtgacagcagggggaggggctgttccctcaacacgtcatcacctgcctccctccaatcagttccacaggccacgaagcagacactaggaaaggaaggtgccaccccgcaccacccccagtctcgccttgagagaataaaggcagcgtgtgatgaaatgccaagttctgaggcaggtggttcccaggatggtcagcgccgcaatggccttctcagcatgttgctgagtcctgcagctggctgtcctgcaggccccaagagctgcagctgctccaggcagcatctccaaccgcagccatgcccaggctagcaaaacttccgacctcctttttattctttaatgaggtataatttacattaataacctgcacttatctaaagtgtacaatttgatgagctcagtcatgtgggaagccataaccacacattccatcgcccccgaaagcttcttcacacccctttgctgtctagccccatccctaggcacccaccgatgtgtttttcatcaccattttctaggattttatacacgtgcagtcatgcaggatgagctctcgtttgtctggtttctctcagccagcacagtgattctgatgcgcctgtgtatcgggagtccgatcccttccgttgctgaggcatgcttctcatggtgtgcacggatacagtttgtttctagttcacctgctgaaggacattggcattgtttctagtctgggtctgtttcaattaaagctgctgttaagattctcgtgctagtgtttgtgcagacatgtggtttcatttctcttgggtaaataccagagagaggaatgactggatcgtatggtaactctgggtttcactttttgagaaactgccagactacaccaaagtagttgtcccattttccattcctatcagcagtggacaggggttctggatgctgtatatcctgacccacaggctatgaaagagagagaccaggaagagggcttctcccttcaggccacctgtggacttcagtaaatacgaaccttcagcgggagtgggcgccctgacacaggcgggagagcaaggtgcgttggcccggcaaaggctctgagaaggtctgcattgagagcttgtgaggcattgcttaacctgatgtctctgggtgattcagtcctggacctttgctgcagagttcgcctctaccctcaccctgcgaagaactgcagtggcccctgtgggcattcacactgggagatgctcttctccaggaattccctgggggatggagatcagaacggcctcaagtcctgctcttttgcggatagtggccatgaccggagtccccagagcgaagcagggtggtgcatctcaccccctgccccaagcccccagattgtagaactgaaaatgcaagcatcttttctcttccttccccaccccaggtgctcatctgccggaactaccgtggcgacgtggacatgtcagaggtggagcacttcatgcccatcctgatggagaaggaggaggaggggatgctgtcgcccatcctggcccacgggggggtccgtttcatgtggatcaaacacaacaacctgtatcgtatccctttgctgggggtgctcccaggggactcctgtgtgggtgttggtgtgtgtgcatatccacacgcctgcaagcagggctggtttgtgcacagcgcaagcattggacacagccatgccctcctggagctccctgctgcctgcggagacaggcagacaatgcacgatgacatgtgtgatgggtgtggggagaggagcaggtgtgacttgaacctcttcagcccaggggcccaggaagggaaatgacaccctggaggaagcctgcagggaggcctggcttctgccagctggaggggtgggcaggcactaggcgtgggtgaaggctctgcagggaagagcctcattccaacagctgcactcggggtggctggagagggggcgtgtagggcagcgaggctggagtggtcagcggggtctggggtctcaaagaacatcatctgaaatgtgacaggaagtctctggaggcttttagatgtgtgtcttctggaggtttctggctgctgagtggggcaagactgtggggacaggagaggacatgggtaggtggggagtaggctggggccatcgtgcaggtgggaggggaagtggcctggaccacggaggggtggtggggtacagccccgcccagatctcagagccccccacccttcctgtccttgggcccatggggagacttggccaagccagtttctatccaggaggtctaactggccaccccacagctttgggcagacccgcaagcccatctcagtacccacactactgcggaagggcctgctttgccactcacagcccgtttgagccccagctccagcagccatgggggatccctcaccttcccacagttcagtgggaacaacgacccctcactgcaggaccattcgggtcagttgaactgacttgtgcatattgctcccagcaggcatgggctctgtgccctttcctgtgttcttggagacacttggggccttgccagtacagtgtggccaacgggccagaatatccgctgggagccctttggaaatgcagaatcccaggctccacccagccctgccccgtcagaatctgcattgtaggaagatttgttcctggtggccggtgtgcacattcccatgtgggccgtgctggcccagggctccctgtggtgtgcctctgtgtagatttcacctggctctggaaggccctgagaatagctctgaagatgatcttaggtggctttttttttttttttgagacagagtctcgctctgtcgcccaggctggagtgcagtggcgccatctgggctcactgcaagctccgcctcccgggttcgcgctattctcctgcctcagcctcccgagtagctgggactacaggcgcccgccaccacgcccagctaatttttttgtatttttttagtagagacagggtttcaccatgttagccaggatggtctcgatctcctgacctcgtgatccgcccgcctcagcctcccaaaatgctgggattacagtcgtgagccaccgtgcccggcctaggtggcttttaacccagggaactgacagtcctctgaagccgcccaggtattgggagagggagaggtggctgtggtctgagctcagcaggagccatcagatcagtttctggttgggcccccacatttcacacctgggcatctagggaagagacagggagggctcacccctctggcttagtggacatcgtttcacccccagccgggacagtgctcagcaaggccgtggctgagaggcacccatgagaaggtgagaggcccccactgcccctgcttataaagcatctggggagggcacattgccaggcagcaggagggaggccagcactcgtttgactgggccagcgtccctttcctgggcccctgtgctgtgctggggtgaggcgggaagggagaggatacagcccccaccctccctcctagagctcactcctgggcagacgagccaggcagcacagatgtgccatgaacagggatgtccagggtgcagtgcatgggcctacagaggaagaaccagccttctctggcggcccggggacccattagggaaaaaggaataggaagcgcccagcacacactgaccctgggaggcaggggctggctcctgtggcagaagggaacatctgtgccagacatctcacctacattgccttggtgagttcattcacaggcctccattacacaggagagaaatatcaaggtttctctagaaaggtttatttcatgggccaaggcttgtgtttccaaagccaggaagggctgaagccagaattggccctggctgcttgccacagagtctggccgggggaccctggacctcagcagggtcatgatgaggtcagctttggaggagcagggccagtgtgtcctgctttctgctcctggaatgagcctcactccctccctgctcaaggcagcccttcacccagccgccgggacaggtgccctgtgccacctgccatccctgtgattctccatctcagtgagtgctccctggggcctgggagcgcatctggctggtgactcctgtgtcccaggtctagcttggaccaggagctttgtagcccaccatgggccaagtaaacggctgggagtggggatagggaaggctctgagggttgtgagggttagggggtccctccatgaaccaggatcttccaggcagcagccccagcctctgaatgctccttaactgtggccgccatgcagtggttgccacatccaagaagaacgcgtgcgtgtcgctggtcttttctttcctctataaggtggtgcaggtgagtctcgctcggaggggccgtgggcttgggtggaggttgtcttggctctgcttgtggacctccccatacctggccaccctacagagagctgtggcatccccagggagcactggggctggaagcccaggaagtgggaaaggggagtcccaactccccacgcctgtggaattctatagctcacgttgctcccctaccgtggggaagaaaggaaagtgaacaggaaaaggtagggctcagagcaggggtgccctgaccctggaagggacaagcaggggtcagcgagctttggaaggatgtggggtgaccagctggatggggctggaataaccagcagagctgcagagctgagcccacctcagaatctcccagggggctctcaaggcacagatgcctgacgcccaccttggagagagctgacacgccaggcccaggctgccagtgagacacagatagcagccagggtgaaggcgccaggacaggtgtatgtgtggtgcagctagggaggccagcgtgcgtgtggcagagtatgaggctgaggtcagctgggaagagggcggattatacaggagtgtggatttcattccacttctgatgaaaggtagtggagggctttaagcaggagactgacaagacgtggtttgatctaaagcagcctctctggctgctgagcagaaggaggacttgaggccagtgaggaggctgctgctggcttcccggagaggatgggcctggccgaggtgggctgtggggctcacgaaagtggggaacaggacccaggaggcctgtgctgggcctgggaaagctttcatccctcactgatgctgcctgtgcagaatgttggggaacaggggcaagcctgggcggtgagggcttggggaaggagccgagggtcacctgggaaggccccacgtgcaggccaagggctgccttcactggaccggtgatgctgtcacaggcagggctgggcctggctgtgctgcctgtggtttccaagcagaggccgggtgatcacagtcctgaagcgcgcaggggtcagcagatcagagaatgggggatgcgggaaggggaaggtcctcacccaagggttgggctgtgcctttctgttttagtgacgctccttccttcagcatttgtgcctgcaaaagtgcttctaacagcccctcttctttggcgtcccttccttaaccttctgagctttccattgaaatggggaagatgcatcaagctttccactgaaatggggaagatggcagctcatcaggtccttgcctgagtcactccagactcagaaagggatgacagttacagtcgctcaggaggggctgcctgtctgcgggtgtctgggcagggaagagaatgggaacgcagagcttctgaaggcctcgggacatctgcagtggctccagcctggccccaccccacagccagccactgctgtcctgccccataacctgggtccagggccctgtagcacaccaccgagcctgggaagtaggctgttggtaggacttagcgggcaaatgaatgtgtgcaagcgttcattcattcctcatccgtccgctcaatgatctgcctcccattcctccctccctccccaaccgccacaggtgttttccgagtacttcaaggagctggaggaggagagcatccgggacaactttgttatcatctacgagctgctggacgagctcatggacttcggctacccccagaccaccgacagcaagatcctgcaggagtgagtgggcaggggtggggcctggggccaggcctgggcggtgtcatgacatcgacgtcatcaggtgtggaaacagaaggggcaaatttgtgttcatgttgtcccccacctgcctcccacctccagcagtattcgggtttttactaagttgctcttagtggttttaattcgtttcctcctctacgcccccacataaccgtgcttttcctgctcctcatctttactctccatccacacagatgccttcagtaccttgctactaaggagtcacctcccttgtttttactgtcataaaatgagactgtgatcgaaatctcccctctttggaatcctgcccttcagataagaagcaatgtgaattaagtgcttcctgggggccgggccccagcacttcacattcactcgattcacagcctccccgtataccgtctccccattttacaggggacaagcaagcagactcccagagaagcctgtgttcctaaccgctgcacctcctgctccttcagcaggatggggtcaccaggttacactccgaggcgtcagttccatccacgtgctcagcagggacgggaagcagctcacacccacttcttgttttccttcccaacatggtcttcttggtcccccaaaatgagcacttcagcctctataacttgagtgtattggcttttggaaattgtgaagatttttctgtatgaagcagccccaggtgaaccagaggctgccttttctggagctgctgaaatccaagggctattttcaagtcggtcagaacctgccctgtaccccccacccaaccctgccgaaatgtcaaggccagaagctgtggcgttggtgcgggtaccacctccttcactctgagcgtgtggccccacaggtacatcactcaggaaggccacaagctggaaacaggggccccgcggccaccagccaccgtcaccaacgcggtgtcctggcggtccgaaggcatcaagtatcggaagaatgaggtgttcttggacgtcatcgagtctgtcaacctcttggtaggcctcttttctttccttcttctgtagggttttatctcttccacgatagaaataaacacagcattttaaaactggcaaagccccgagagccgttctgtgtggtaacagatagcaggattcagtttgggccactcattgaaatgtgagtttgtcttatcttttttttttgagacggaatctcattctgtcgcccaggctagagtgtggtgacacgatctcggctcactgcaacctccgcctcccaggttcaggcgattctcctgcctcagcctcccgtgtagccgggattataggcacccgccaccacgctcggctaaagcttgttttctttattagcatttatgctgactgagaatccatacatgcacattatttttaaaaattagaagcagggtatgaggttagaaagtgaagggctcttatcagtcaccatgcacagaaaaaaaaaaaagaaactaaagggctcctataatcagaaagattaggatttattcaccgtcaccctctcgggcctcattctgtagacagacagaaacaagtatattgatttttctataaacctgagatcataagatgtggttctcctgcagcttgtttttttggtggtggttgttgtttgggttttgattttgcgttcagtgttactgttttgtatatttttttcttttggttttttaattatgaggaaagttgacgttttgaaaatgaattttagcgcttgtacagatttgtgtacccatcaccacacccaggacacagaacctcaaaacctcctcatgttgcccctttgtagctccatgctcccctcttccccatttcctggccaccattgaactgttctccatcactggagtcttcatcgtgttgtgattgtcacacgagtggcatcatatgtcaccgcagctgtctttctgagattgtcgtatgaatggcgtcatacagtcatgagctctcgagtctggctgctttaactcattctaattctttgcgattcatccaaatccaattgttttgcatatcaaaagtctgttcccttttatatttatttatatttattttctgttctgaaccacagaaggacatttgggtggttttccaatctttggcaattgtcaatagagttgctagaaacatgtcgtgtccaggtttatgtgtggacataagttttcatctctctagggtaaatacccaggagtgggatggctgggtcacacggtaagtgtatgtttacctttataagaaactgccaaaccattgctgttttgcattctcgccagcaacagatgagggttgtgatgaccccacatcctttgtcagtagttttatttttgtcatcctaataggtatgtagtagtatgtcagcacagttttgtgttttgtttttgtttttgtttttgagacacagtctcgctcttgtcgcccaggctggagtgcaatggcactatctccattcactgcaacctctgcctcccaggcttaagcgattctcctgcctcagcctcccgagtagctgggattacaggcacccaccaccaggcctggctcatttttgtatttttactagagacggggtttcaccatgttggccaggctggtctcgaactcctgacctcagatgatccacccgcctctgcctcccaaagtgctgggattacaggtgtgagctaccacgcctggcctattccattttcttaatggctaataatgttgagcattgctttacatgtttctttgtcatctgtatatcctctttggagaaatgtctctgtgcatctttttagcatttttaaattgggttattttcatatagttgagccttgatagttctttgtgtgttccagatagaagtcctctgtcagataggtgatttgcaagtattttcccccagtctgtagcttatctttttattctcttagcagtgttttttttttttcgacagagtctcactttgtagcccaggctgtagtacaagtggcatgcttggctcagtgcaacctccacctccgggcttcaagtgcttctccagcctcagcctcccaagtagctgggattacagacgcatgccaccatgcccggctaatttttgtatttttagtcgagacagggtttcactatgttggtcagggtggtatcgaactcctgacctcaggtgatctgccttcctcggcctccctaagtgttgggattacaggcgtcggccaccatgcccagcccccaatactatattgaataggagtggtgagagagggcatctttgtcttgtgccagttttcagggggaacgctttcagcttttgcccattcagtatgatgttggctatggatttgtcatagatggctcttattattttaggtatgttccttcaaaacctagttagttggctgggcatggtagctcccgctctactaaaaataggaaaattagccgggcgtggtgatgcgcgcctgtaatcccagctactcgggtggctgaggtgggaggatcacttgagccccagaggtagaggttgcagtgagtccagattgtgccaccgcactccagcctgggcgacagagcaagaccctgtttcaaaaaaaaacaaaaaacaaaaccaaaaaactccagtttgttgagagtttttaacatgaagagatgttgaattttatcaaaagccttttctgcacctattgagatgatcatgtagtttctgtctttagttctatttatgtgatgaatcatgtttattgatttgcatgtattgaaccaaccttgcatcccagggataaaagccttcttgattgtggcggattagctttttgatgtactgctggattcagtttactagtattttgttgaggatttttgcatcaatgttcatcaaggatattggcctgaagttttctttttttgttgtatctctgccaggttttggtatcaggatgatgctggcctcatagaatgagtaggggaggagtccctcctcctccgtttttttggaatcatttcagtaggaatggtaccagctcttctttgtacgtctgatagaattcagctgtgagtccgtctggtccaggttttttttggttgttaggctatttattactgatgcaattttggagctcattattggtctgttcagggattcagtttctccctggttccatcttggaagggtatatgtgtccgggagattatccatttcttctagattttctagttagtgtgcatagaagtgttaataatagtctctaagggttatttgtagttctgtggggtcaatggtaatatcccctttgtcatttctaattgtgtttatttgggttttctctcttttcttaatagtctagctagcagcctatctatcttattcattcttttaaaacaccagctcctggcttacttgatgttttgaatggtgtttttgtgtctcagtcttctagagttcagctgtgactttggttatttcttgtcttctgctagctttggagttggaggcttttgcttcgtgagttcttttagttgtgatgttaggttgttaatttgagatctttctaactttttgatgtgggcatgtagtgctgtaaatttctcttaacactgccctagccgtgtcccagagattctggtctgttgtatctttgttcttatttgtttcaaataatttcttgacttctgccttaatttcattatttacccaaaagtaatttgggagcaggttgtttaatttccatgtaattgtatgggtttgagtgattttcttagttttgaattctatttttattgatttgtggtctgagagagtggctggtatgcttttggttcttttgcatctgctgaggattattttatgtccaattgtgtggtggtttttagagtatgtaccatgtacagatgagatatattctctcgtttttgggtggagagttctgtagatatctatcaggtccagttgatccagtgctgagttaaggtcctggatatctttgataattttctgccccagtgatctgtctaatactgtcagtggggtgttgaaatctcccactgttattgtgtgggagtctaagtctctttgtaggtctctaagaacttgctttatgaatctgagtgctgctgttggctgcatatttatttaggttagttagatcttgttgaattgaataccttaccattatgcaatgcacttctttgtctttttttgatctttgttggcttaaagtctgttttgtctgaaattaagattgcaactctgcttttgtctgttttctatttgcttggtagatttttctccatttcttcattttgagtctgtgggtgttattgcatctgagatgggtcttttttttttcttttgagacagagtcttgctgtgttgcccaggctggagtgcagtggcgcaatctcggctcactgcaacctctgtcccccaggttcaagcaattctcctgcctcagcctcccaaatagttgggattacaggcacgcgccaccacgcctggcggttttctatttttagtagagacgaggtttcaccatgttggccaggctggtctcgaactcctgacctcaagtgatccactcgcctcggcctcccaaagtgctgggatattacaggcatgagccactgcacccagccaagaatggtgtcttaaagggagcatatcatttggtcttatttctttatccagctcttgccactctatgccttttaattggggcatttagcccatttacattcaaggttagtattgatatgcatgtatttgatcctgtcattgtgttgttagctgtttattatgctgacttgtttgtgtggttgctttatagtgttacttgtctgtgtacttaaatgtgtttttgtagtggctagtaatggccttttctttcctttttcttttttttttttttgagacaaagtctcactgggtagcccaggctggagtgccatggcgtgatcttggctcactgcaacctctgcctcccaggttcaagtgattctcctgcctcagcctcccgagtagctgggactacaggcgtatgccaccatgcccagctaatttttttttggtatttttagtagagacagagtttcaccatgttagccaggatggtctcgatctcctgacctgacctcgtgatccacctgccttggcctcccaaagtgctgggattacaggcgtgagccactgcacccggcctttttttttttttgagatggagtcttgccctgtcacccaggctggagtgcaatggcatgatctctgctcactgcaacctctgcctccctggctcaagcaattctcctgccttagcctcccgagtagctgggattacaggtacccaccaccatgaccggctaatttttgtatttttagtagatatggagttacaccatgttggccagactggtgtcgaactccacacctcaggtgattcgcctgcctcagcctcccaaagtgctgggattacaggcatgagccaccacacccggccttcttttcatatttagtacttctttcaggagctcttgtacagcaggtctgctggtaaacaaattccctcagcatttgcttgtctgaaaggatcttttttattcttctttttttttgagacagggtctcattctgttgctcaggctggagtgcagtggcatgatcatggctcactgcaacctctacctccctggcacaagctattctctggcctcagcctaccaattggctgggactataggcaggtaccaccacacccggctaatgtatatgtttttggtagagatggggttttgccatgtttcccaggctagtctcagactcctggattcaggcactccacccacctcggcctcctaaagtgctgggattacaggttgagccaccacacccaagttgaaaacgatctcatttctcctttgctgatgaagcttaggttggccagatgtgaaattctggattggaatttctttaaaaatgtttaatatattggccaggagtggtggcttacacctgtaatcccagcactttgggaggctaaggcgggggcgggggggggggagaggggggaggggggaggggaggggatcacctgaggtcaggaattcaagaccagcctggccaacatggtgaaacctggtctctactgaaaatataaaaattagcagcacgtggtggtgcatgcctgtagtcccagctgcttgggaggctgaggcaggagaattgcttgaacctgggaggcggaggttgcagtgacctgctgagatcccaccactgcactccagcctgggccacagaatgagattccatctcaaaaaaaaaaaaaaaaaaaaaaaaaaaaagaatgtttaatataggcctccaatctcttctggcttgtagggtttctgctgagaggcccactgctagtctgatgggcttccctttgtaggtgacctgctatgtctctctagcttctttcattttgaccctggacaatctgatgattatgtgttttggggatgatcttgtgaagtattttgcaggggttctctgcattccctgattttgaatattggcctctctagctagactggggaagttctcatggatagtatcctgaaatacgttttccaagttgcttccattttccccatctctttcagggacaccaatgagttgtagatttgctctcttttttaatcccatatttcttggaggctttgttcattccttttcgttattttttctctattctcatctgactgtcttatttcagaaagccagtcttcaagctctgagattctttcctcagcttggtctgtactactgttaatacttgtgattacattattaaattcttatactgtgtttttcagctgtatcaggtcagttacatcattttctatcctggctgttttgtctgccagctcatatattgttttattataattcttagcctccttagattgggtttcaatgttcctaatctcaatgatctttgttcctatccatattctgaagtctatttctgtcatttcagccatctcagcctagttaagaactcttgctttgggaggccaaggtgggcggatcacaaggtcaggagattgagaccatcctggtgaacacagtgaaaccccatctctactaaaaatacaaaaaattagccgggtgtggtggcgggcgcctgtagtcccagctacttgggaggctgaggcaggagaatggcgtgaacccaggaggcggagcttgcagtgagccgagattgcaccactgccctccagcctgggcgacagagcgaaactccgtctcaaaaaaaaaaaaaagaactcttgctggagaactactgcagtttggaggaaagaggacactctggttatttgagttgtcaagagtccttgtgctcgttctttctcatttttgtgggctgatattcctttagtctttgaagttgctgtcctttgaatgggtttctttttcctttatcctatttgatgaccctgggggtttgattgtgtataaggtgggttcagttggatggcttcattattggaagattttaggggaccaaggctcagcttaggactcctgaactgcatgctctaactctggaggactggtatccagccctggctttgatctctggctccttcaggttaagaacctgctctgctagaggggccaagctgctcccagacagctggtcacaacactccaatgggtggtgccaggcaaagcacttcatagggtagtggcagcaggatctgttcttgtttgcatgtgccagcggcagcacagcggggtgcacgcttatcggctgtgacagagtgctagtggatgtcagggagccagcctctgggagggcatttgtagcagcagcagtagtggcagtatggctggggtgggggcaggggccacgctggcaactgtgcacctgttcattggtgccgatgatggggttagcatgggggcactggtgggtgcaggactgtgtgtgccctttgtgcatgttcacactggcagcagtggctgctcagggctaggggtaggtcctctgttttctctgcctagtttcctgtgggaggcccagcataggtggggaactgggaggggtggggctggcgggctctatgctgccaacactctgacaacaacggtggtgggagaggagaatgaggggctggggtgcacttatgctggcaacagtggcacagcagggtgcacacacaggcatgctgttggggaagggtgggctaggtccacccacgcacacaccaccagcaaaacaatattgagggtgcctgtgggcaagaacctgcaggcaaaactgcacaggggaggctgcagtgggagcggggctcaggtgggctagtgtgtccatggggccgctgtgcaggagtattccccgttcaggtacagtctgccagtgcaggagctctgatgccgcccccaagaggtacctggggattgcactgcaagcaggcttggccaggctggggccccaggagaggccagcagactgagggttgctcaggtcagaccagccccatctgatgggcaagactaccctggagagttcaggtctgacagttcccctacggctaaagtctcctatgagagcaagtcaagcctaggggatgggtgtcctggctgtgctccaccacatatgcttctgcatcaaaccccctggcctggcttaggctggagttctgccccgcctgaggtaggaggcagaactcgacttaggaggtgaggcttggacaccagaccaaattgaggctagctaaaagaggtcagggcagaagcgcctccccataagacccaccccacagtgtgctatgtcagtttgccattgccgtggcaacacttggaagttactaccctttttcatggcaatgacccaacaacctagaagctaccacccacattctagaaatttctttataaactgccccttaatttgcatataattaaaagtcagtataaatgtgactgcagagctgcctctgagctgccgctctgggcgcactgcccatggggtagccccgctccatagggagcagtgcctctgctgccgtgcacatggctgctttagtaaaagttctgtttatcaccaccagctcgcccttgagttctttcctggctgaaaccaagaaccctcccgggctgtctcagttttggggctcgcctgccctgcatcactaccacttctttaagcagcttcccctgccaacgcagctggccgtggcagtcgaggggtccttcctgccgggattccagaggccatggcaagagtgggttgccccttgctagttcaattcaccccctccacaggagtcactgggagccaggaatgattcctggtgcacagtagccctgtgcagggttcccagcctcctcctctgccttccatccagcctctatgtcttccctccgttcactctcagggccttcccactgaagatctaggagtctaggagtgcacctgtctgcacagtgtccctgtctcttagtgggagatgtttctcctggctgcgtctagttggccatcttggagcaggagcaaaatctaggcagtctttaaacagcttcaaattagggttctcacaaacccctctttgggtaagcaaggtatagagggaagggacccagagcttccttgccctctctggacacaccaccctccaggaacctccacgtgttcagctctctggaagcttcttttatctcttttgctttacgtcttccctcactgagacttccagcacagtgttgaatatgagtggtgagagctgacattcttgctttgttcctgatcttagagggagaccattaagtcttttgccaccaactaggatgttagctgtaggtttattataggtgttctttttcaccttgaggaagttcccttttattgctagtttgctaacagtttttttttttttttaatcatgcgtgggtgttgtattttcttcagttctttttctgcatcaattgatgtaatcacatgagttttcttcttttggttgttaatatggtgtattccactgactgctttctgattattgaaccagtgttgcattcctggaataaaatcccattggtcatagtgtattataggttgagtatcccttatacaaatgcttgggagcagaagtgttttggatttcagatttctttggattttggaatatttgcatatgcatcatgagatatcttagggctgggacccaggtccaaacgtgaaattcatttttgtttttttgttttttttttttttttgagatggaatttcgctcttgttgcccaggctggagtgcaatggcacaatctcagctcactgcaacctctccctcctgggttcaagcgattctcctgcctcagtctcccaagtagctgggattacaggcacctgccaccatgcccggctaatttttgtatttttagtagaaacggggtttcaccatgttggccaggctggtctcgaactcctgacctcaggtgatccacctgcctcagccttccaaagtgctgggggaattcaggtgtgagccactgcacctggcttcatttatgttttatatacaccttatgcacgtagtctgaaggtaattttacttttcccttggagatgctgaataaactgcattgtgcacctgcattttgactgcaacctgtcacatgaagttgggtatggaatcttctacttttgacatcatgtcagggctcaaaaagttttggattttggagcattttggatttgggatttttgaattaggaatgcttaacctgtattctttttatgtattgctggatttcctttgctggtattttgttggagatttttggatctacactcataagagatactggtttgtaattttctcttttttgtaatgtttttgtctggttttggtatcaaggtaatggaggaagtgttttttcctcttccgttttctggaagacattttatagaatccatgttaattctttaaacatttgttagaattcaccactgaaactatccgagcctggagatttattttacaaaatgcttttaactattaatttcaaaaaaaagtgttttcttgagtcagggcttcgatctgttgcccaggctggagggcagtagcgtgaacacagctcactacactttgactccagtgatcatcttgctcaagtgatcatcccgcctcagcctcccaagtagctgggactgcagccgtgtgccaccatgcccggcttttggggtttttttgttttttgtgttttttttgagacagagtcttgctctgtcacccaggctggagtgcagtggcgcgattacagctcaccgcaacctctgcctcccaggttcaagcgattctccagcctcagcctcccatgtagttgagattacaggcatgtaccaccacacctgggtaatttttgtatttttggtagagacaggatttcaccttgttggctgggctggtcacaaattcctgacctcaagtgatctgctcaccccggcctcccaaaatgctgggattacaggcatgagccactgcgcccagccctaaaaaggtttttttaaaagccattcttgtagaggaggtctactggctacacattcccttggctttcctttaagaatgtctctatattttacctttatccctaaaggctattttcactggatatggacttctgaattgacggtttttgtttagcactttaatatgttataccacttccttctggcatccatcatttctggtgagaaatccacagtcccccaaatctttattcccctataggtgatgtattattgtcctctggctgctttccagatttttctttgcctttagtttcagcagttagatgaggtgtgcacatctttgtgtttctactgtttgggatttgttcagcttcttggatctgtaagtttatgtctttcatcaaattgggaagttatcaatcattgtttcctaaaatatggttttttgtttttttgttttgttttgttttttgagacagagtttcattcttgttgcccagtctggagtgcaatggcacaatcttggctcactgcaacctctgcctcccaggttcaagctgttataagtaaaatgtttattcagaaacagaatgcttgttcctcggtaccacaaggaaaaatcagcattcaaacaaaaagttttctcagcaaggcaaatttactttctgcagaaagggtgctcctcgcagatggaacaatggcgagagcacacccgaacaaaggaggaaagccgtttttatcccttatgcagcttgtccctgctgctgtgtcctatctccattggctggagccagacctcacaatctaagctaaacctgactggctaataacttaaaactttcctaaatagataaaggcaagggagaacaaaggaaaaagaggaagttgactcattcccttatatctaacatcccttacatctaaaaacaaatatcttggttaaagtacaaggacacagaatgtactcattcccttatatctaacatcctttatgtctaaaacaaatatttcggttaaagtacaaggacatagaatgtacattatttctaacacttatgatttattctttagtgagaagggaaactttgaagaggaacttttttactttctacaaagcaattctcctgtctcagcctcccgagtagctgggattacaggcattcaccaccacacttggctaattttgtatttttagtagagacagggtttctccatgtcgatcaggctggtctcaagctcccaacctcaggtgatccacctgcctcagcctcccaaagtgctgggattacaggcatgagccaccgcacccagccctcagatatgtttttgtcattttactcttccttcaggactccagtgacatgaaagacctttggttattatatcatgtgtccctgaggctgcttattttattctatcttttcttctctctgttagattggataatttacattgaactgcctttaagttcacaggtcctttggccctttcctgtttatctccattctgttattattattattactattattattattattttttttttttttgagataggttcccactctgtcatccaggctggagagccatggagcaagcatggctcactgtagccccaacctcctgggctcaagcgatccttctgcttcagcctcctgagtagctgggactacaggtgtgcaccaccaagcctggctaatttttaaaaaaaaatttttgtagagatgagggtctctctgtgttgccctggctgatctagaactcctggggcaagtgatcttcccacctcagcctcccaaagtgctgggattacaggcatgagccactgtacctggcctccattctgctattaagtccattgagcaagttgtttatttcagttactatatttttaaaaattttccatttgattcttctctttttgtttgtttttgtttttgtttttgttttgagacagggtcttactctgttgcccaggctggagtatagtggtgcagttatagctcactgcagcctcaacctcgtgtgttcaagtgatcttcccatctgagtgtgctgagtagctgagaccacaggcacgcaccaccatgcctggctaatttttttttattttttattttgtagagaccaggacttgctgtgttgcccaggctagtctcgaactcctggttgattcttctttatcatctgtttctttgctgagactttctattttaacatttgttgcaagcatttgcaattttaaaaatagctgtttaaagtcttcatcagataatcccaacatctgtgaagtgttgacagtggttgattgggttttccaggcaagttgacattttcgtggttgtttgtatgctgagtaattttggattgcatcctggactttttgagcattatgtggtgatactctaggtcttatttaagctatatgggaaatattgatatttttgttttagccaacagccaatcttactttcaggccacaagttccaatccccaacctgtaggccatgagcatcacgtcagtttttaaagcccccgtgccatttcctggtcagatctcctgggcgtgcactgcccagtggtcattctgggacccgagtggttagttcagttctcaaactctttcgtaagtcaaactatggtatatgcacaggattcacagatgctcgattctagagagttctggagacataaaccacttcatggggtgactttcctgagcttctggctctgtgctgtctacctggtacttttctgattccttgcggtttactgttgtacacgtctgccattgggcccacttcccagcccacatggagagaggacagagagagaaaaggacaacggttgccccaccccctcggaacagtagctggcaccacagggcctggggcatgaggaacaggggagatggggggcttctgtgttttccaggagagtcaggagttcctcttctggccccagagccaggcctggaggctctgctgagctctcgtgtgctctgtggtgcacacttctgcttccagattgctgctgcactttctcgtggggggcggtgggaacactctgcattcgtggctcttccctggtccacctgctgctgtcttcagtcttccggcagctgccaagcctcctgcccaggtttcagagctgtagtcagtggcaggggaaggggcgccagccgacctgcctcaccagccgcttgctttcttttgtgttcacgctggcctcatccctgcggtgtgggtggactgtatgggctcagccaatccagtcatgcaggtcactcaggtcccgtttctgacggccactggcagtgcagcattgagcacgcttgctcagccccagacgtgtgcacttgggtgtctccgtgacctgggccaggatttctggaggactgaggctgcagacatggaattgccaaggagagtgctgcccagaaagactgtctcgcgcactccgtgcagacctcttcgctttcttactttccgggacgggacagtggcctcgctaaccacattcccctctcccctggggactcttgtctgattgtttattgagccgaaaacagggtccatctgggtgctgtggggtgcaaaggcaagtcccagggggcagcttagagagagtcgagcaggaaagcgctagggctgcgggggtccccgccacagtgcgctgctgcatgtggctccgcccggaaggatcccactcctccaaacaggtcagcacaagggcagctgtcaggatgccaccttcctaagtggcttgcagagctggtggctgggtcaacatttgcctccagatgcgatcatctgagtgcagcctggtacttacacagccgggccctgagcaagcatcccttcagcacccgccctgggaagggcaccggctctgcgtggctggtcacacctcagctgagaaggttctgattgctgcccgcagggccgagatcagcctcgtgggctgggcagcttttcagctccactccctgggcctgctctcgcggcattcacgacctcatgtgttcagttacagctggctgccagggccagtcccaactccctgagggggaggcagcacccaaggggaattaggggccgtcacagtggagtggagggccctccgagaaagaggcaggcaaaatcccaatgctcgggctcctggagccccggccagtgagggtcccgagctcctgagcctccgcttgcccactgagcacctcctgccacacacgctgtttctggtgctggacacggcagcgcgcagccccacgtggcttcccccagcagggagagagagagagagacaagcaggcagacgcagggaagctgttgtgcaccatgggatcagggagccgcttgcgagatgaggacaggacagcacgaggaggtgaggctggggaaggtgacagaaccggagcccttggggccatgtccggttccctgcccctcccagggctgtcatttgcttggcacctcagttttcccaattccctcagaggcggcaagctggtgaggggcttttgtttgtctacccagtgctttttggacatcatgcataagactgcacagactctcctgccactctgcagacaggaaatgcaggccctgcacatgttagcctggctggagccagcatctgggcccaggtatccaagtcggtggcctttggcccacttgctggtgtgagcatggcctcgtgcagcatagcagtgtgcagtggtggccagggctgcagccccagcgattcttctgccagtcactctgtgccctcagcacggggcctctgatctgtgcctgtttcctcacctctaaaatggatgcaagaagagatgctccagcatcttggctcacgcaggacaggctagggggtgcaggaccgtcgccccggtgtggattttcagttgcactttcagatgcatctcggcatgcgcagtgggttacagcccctcaggtcatctccccacagtccctgccccagaggttgtcgaggcgtgtgtggagcaatgcctggcgcagtggaaatgctgtcagtgttagccactgtgactggatttaagttgattattttggatcaagtgttatcacacttcagggtggccctgagaagcaagaaggggtcaggactcaggaagcaccatctctcataagccctggggggtgaggggccagtggcctccctgggaggccaagaggagaaacagctttcaagaaaagcaagtctggcctggttcaagagaccccagcccagcccagcccatcggctgagcagggaccacagggtcctggcccaggtccagccgagctcatggactctcaaagctgactcagcgtggggaccagctgccgggccggcccggagcattcagggggctcctgggagggagggactggtacctgatagagaaccctcagagggggctccaggcacgcatcatcaggtcccagtgtggcctgaggcctagagggcaggacccacagtgtccacctcatgtccacagggcctcggcatgaaggctggaggggtgagcctggggaccctcagccaggcgtgggttggtgtgggttaggggtagaccttagccacagctgggactctcccagctcaggggatgcccaggagagggatgggcttggaggtgagaagggcgttgagagtggggtggccagagggtcacatgatgtggtaggaggcagtggctggtgagttggggacctcccctcacgcccacaccgccacccccaggtcagcgccaacggcaatgtcctgcgcagcgagatcgtgggctccatcaagatgcgagtcttcctctcgggcatgcccgagctgcgcctgggcctcaacgacaaggtcctctttgacaacacgggccgtgagtacccttgccaagggccctgcccatgaggatggcctcaccaggcacacacattacagcctagggcagggttgggccaggcggaggaacgagctggtttcaagcacttggttgagcagcacttcacactgcttgagacagctgtgtagagtattcatccttccctggacatagaaggtgcaggggagtgaagatcctccagtccagctgggaggcccccgtcacccggcctcacacgccaggtcctgcaccctgccctgctctgcctggggcactggggcctaggctaaggccttgctctctccctcccaggccaggtttctcccctcaccttgggccctaggtgtgggccgtgtgaaggccacgcatggtgattctcgctcccgccgcctggcctctaacacttcccacagcagggcgggggcagaggggcccagggcctggttttgtgaactgtgcctcccactcagctgtcacaggccactggaagagggtgcagtggctgggcatgcccccgttcctagcccggtgagggcttctcgggcatcagtctatcagggcagctccccgcctggggctgggcagggccccacccacatagccctcagtgaggtggcaaaccaaggtaggacccaggaccccgtggatgccagggcctgagcccttggggagccccgagccatcccccagccaagtccactgatcaatcattcagtgaacgtgtcctgagcaggtcccctggctgggccctgggatggccgctggggactcagcatgaaccagacccaccagccctgcccctggggaccccaggggtgtgaggagtgatggggcagttgtcttgggacccagcccccttggtgtttgtggcccaggctgctctcagtgcgtggactgggggccctgctctgccggggtgggttgcaggtggtaggagtactgctgagatagtgacccggagggcccagatctgtcctaccctcacccctgaccccaggcggcaaaagcaaatccgtggagctggaggatgtgaagttccaccagtgtgtgcggctatcacgcttcgagaatgaccgcaccatctccttcatcccacccgacggcgagttcgagctcatgtcctaccgtctcaacacccacgtgagtgcgccaccctggggctgggctgtcggcagactcctcctccccttcacctccaggaggtgaagcccaggcaggcgccagggccagccccaccccacgctccatgagctgcctggctctgcagagatggagtctgaggacttgggactccgagctttctgaggggcacagacccctttggccaccaccacccctttcccaggcagcccccagagcaggccctggtcatgttttctgcatttgccccaaggcctccccggtagctcccggctacctcggcctgtctgccctggccctccctgacgctggctgtacgctccctgcagggctctgggcccacacctgggcagatggtcccttgccctgggccttggtttcccctctgaaatgggcctttgtcaaacaaggccaggtgtgagcaccctctttgccctccttggcaggtcaagcctttgatatggatcgagtcggtgatcgagaagcactcccacagccgcatcgagtacatgatcaaggtgcgtgggccgaggccacccactgagggccttctggtgtctctggcccgtcccaggagcctaaccgagggctgggggtgccgtagggctgccatccgtgcaccctcactgtggcctcagatgcaggagtgacctgacactgaggggacaccgcctggggcctgctcctagatggtgccacttgtggggaggggcctgtagccaggcatccaggacactcccagaggtgttgcccccaggtggagcacctctgcccctcagcgaccctgtccagcgcagcctggccctgggacatagacattgtcctaggagggcagggcagagggagggatgaggagccttggaagctgagcagacaggaggatgaagatgaaactcctgaaattaggtcttgggagagtctcgagggcaggagaaggggtgggtagtgcctggagaagtggggccaggggcggggctagggaggatcccccgggccaggctgaggggcatgtgtcctggagaggctggccagctcaccttggcctccataaccccgggccgcattggcctggcctgcaggccaaaagccagttcaagcggcggtcaacagccaacaacgtggagatccacattcccgtgcccaatgatgccgactcacccaagttcaagacgacggtggggagcgttaagtgggtccccgagaacagcgagatcgtgtggtccatcaagtccttcccggtgagcactctgtccagacatccacgtgccccctgcgcctgtctctgcaaggcagcctgggtgcctcaggaccccctgcacctcaagatggggtgacagtggccactgtgtcttccacacctggggcttctgaaagggtggacggagagctgaggactggagtgggaggaagcagaggctgactcggcccctgggcccctttctgccttcctcttgtttgtgaaccagcctctgtcttcacctcagggcagtgccctctccctccctctctgtgatgcccctgagtactgatgtgagatggggctcctgtccatgcaggccctgaaggagccccgtccacactggcaggtccaaggccctttctgtgcaggctcagccttgcctgccatcaaggggaacggctgcctgtaggccggagcagcacagcctccagagctccgcaccagccgcccatgtcctgggccagctctgcatcggcgtggcttccctgacaacatgttaaggattctgaggagctgagtctgggcttgccgggtgtacacagtgcacagagaggctaggcccaggcatggctctggagctgagccgggtggcactgacctgctccaccaggggggctcagggcaggcgctgctttccatgttctcccctctctctccatctgcatcccagggggacttggggacagccccagctgagttaagctggaaatgctgcaattcaagtgccttgaatttcatgatggtactttccctcccagcctcagtctaatcacatgacataaaatacagaaagtagaggaaggagagagaaaagccagttaccccaccacctaatactcccgtcagcctttccgcgtgtctcctcacctttctttctgcgtattttgcttttcctcattatgtgcaagtagagccagctcagtgcctgcccttccacgtggcgctgcggcagagcgttttccttctggtattgactgtcttcttggcggtcacctttgggagctgtggatattccatggaggggtggtgaccatcccggatagttggattagctcctcttttcctgcaattccactgttgaaaatagtgtttatcatttaaaacacactgggagaatacttcatcaaataaacagcatggtgagctgtagacgggggaggaagggacagggctaagggccgagacacaggctggcgtggactgtgcttgtgtagattttacttcgaagccatgcacaggcacacctcattttattgtgcttcccagatactgcatttttatttttgttttagtttttaaacaaatggaaggtttgtggcaaccctgcgttgagcaagtctgttgatgtcattattccaacagcatgtggtctctgtgttgtcactttttagcaataaagtatgttttaactaaggtatgtacattctcctagacataatactgttgcacattcagactacagtatacggtaaccttttttttttttttgagacggagtctcgctctgtcgcctaggctggagtgcagtggcacaatctcggctcactgcaacctgtgcctcccaggttcaagtgattctcctgcctcagcgtcctgagcagctgggattacaggcatgtgtcaccacgcctggctaatttttgtatttttaatagagacggggtttcaccatgttggccaagctggtgacgaactcctgaccttgtgatccgcctgactcagcctcccaaagtgctgagattacaggtgtgggccaccgtgcccggctggtaaacgtaacttttacatgcactgggaaaccaaaaaatgtgtgtgacttgcctaactgtgctatgtgctttatggcagtggtctggaaccaaacctgcactgtgtgaaggtacacctgtcagtgcttcccatgcatagaaaacaaaattaaatcacaatggaaaaaaggtaattcctaaaaaccaaaagcaaaattaattcatcagcgtatcaagttgatgacaaccacagagacacgtcacttcaaataacacaccctaaggacaaaaggaactgcaaaaaataaattttaagaaatacagagagggccaggcgctgtggctcacgcctgtaatcccagcactttcggaggctgaggcgggcggatcacaaggtcaggagatcaagaccatcctggctaacatggtgaaaccccgtctctactaaaaatacaaaaaattagccgggtgtggtggtgggtgcctgtagtcccagctactcgggaggctgaggtgggagaatggtgtgaactcgggaggcggagcttgcagtgagccaagattgcaccactgcactccagcctgggcaacagagcaagactctgtctcaaaaaaaaaaaaaaaaaaaaaaacacagagagagattagaaatacagattagatagatagatagatatccttccccctttcttagattgctccatactaaaagtttttttttttttaggttagttttttttgtttctgagatgaagtctcactctgttgcccaggctggagtgcagaggcacgatctcggcttactgcagaggcatgatctcggcttgctgcaactccacctcccgggttcaagcgattctcctgcctcagcctcccaagtagctaagattacaggcacatgccaccacacccagctaatttgtgtatttttagtagaaacagggtttcgctattgttgctcaggctggtctcaggtgatctgcctgcttcggcctcccaaagcactgggatgacaggcgtgagccaccatgcctggcctattgtgaataatgctgctgtgaacgagtgcacaaatacctcttcaagatccagcttccatttgttttgggtgtatccccagaagtggaattgctggatcatatggtgattctattttcaactttttgtggaagtgccatagtgtaggctatttgcttttaaacctagagtgtttctcagtcctgtccctactgctgtctgttaccaggttagggaatttgatatgtgcccatgggtggccatggcacatgacactgtccacctggatggagatctgggccgggccttgcgtccaggccttctcctggctctctctgcatctcctatagcacctgcttcacagaagttgctgccatgttacttcatgcgtgggtacctgtgactattgtgttgtccctgtggcttatgggacggcagcctctaggattgtggcctgtcctcctgtgcacctttctcccttgtgatgatggcagccctgtcctcttttgtctgcctttggcagcacgcctgtcaatgcctgttcttcctacccggggagcccttctcactgtgcctttgtggcgtcgagtgggttttggtgtgtgagccggcgccagcctacagctctcatcgagagcagaattaaacccactcggctcaacgtgacgacacaggctgggtgtgcaggcctccatcgcccctggcgtctgcttccctgcattttctttgtttgtgttttccatttggtctttgctaaggttcagatttggggtctggctgagtgtttggggcacaggctagtcaccgagcgggtttgttccctcgctgcctgctttaccagttgctgatgtcgcatcttccccccgtcatcctcctggagtctgtactcagcacatgtcaccaagtcaggcagagtcctcactctcacgctgccctggtggcagtaggcagagatgaaccactcggccctgccccaggtgcacggggaccgcccctgctgtgaggcagaaacagccctaggcggcagtagctcccacggaacctcggcctgagccctggggagcagagactgtggggtcccaggcacagccagagctgagatcgtgcccccgactgctcagggcgagaccaggcgctgggggtgaccaggctgcaacctgttgctcctcaaggcagagagagggtgaaggtcacagccaggactcgggttccagtcagagccacagccaccccctgctcaccctcaggagcaggacccagggctgaatcgtcactcagtgcatgctccttggtttcttccttttgtcgcctctccctggtcatggttctcacctggacactctcttttctttcacatgctgttctgagactgggcgtgtggcccctgtccccagcagccctcccctgccacggtcattacacactcttccttcccatggccggtctgtctagttcaccagccttggaggaaagtgcattaggggagctgggcggggggtgctgggccactgcagaccacactggcaggggcttggtgactggggctggcagcttggtgagctcagctctgggcgcctgggtatcctcatggggcagctgggcaccccagagcaggggctgtccttaccagcctggggcagcacagggccgagctttggctccccagcacaggggctcatgctcccctccctggactggggtgagtggtcagtctctgcccatcgccactagggccagagctgttggctaagctggggcagggcctaggcctgagcgcctcccccgtctgctccccagggcggcaaggagtacctgatgcgggcccacttcggcctgcctagtgtggaggccgaagacaaggagggcaagcccccgatcagtgtcaagttcgagatcccttacttcactacctccggcatccaggtacgtaaggcccaggcggccggggcccagaacagggacagaggccgcaggtgacagatatcaatgcagccagcttgggaaagggtgtcagtcagctgcaatcaggaccctgctgtgctgtgggcctctgcctccccacagacagggtgaggccaggctgcctctgctcagccctgacccctgagctcaaagctcactcattctgccccaaactagcatttgaggctctgccgtccactcatgccccatgggacctcttttccctggcaccccctcaaaagcccacagagggaggagaggctcccagagagccaggggccttctggccgggccccccaagcaggctgctgaggccgtgtctgcaagccacatcctggctgctcaccacttccagaggcggctctgccctcccacacatttgcatggtccagacaaatccctttcacccccctgaggcctgtgctcatcctgtcgtcatggcctcccctgccagccccaggctgccccagcaggaaagattaaggggggaccaacagggcgggagcctgcggtgctcagggccctgctacctgtgccccaggtgcgctacctgaagatcattgagaagagtgggtaccaggccctgccctgggtgcgttatatcacgcagaatggaggtgagtgaggccctacccgtggggtggggttgtactgaggggtcctctgtggctgcccccagggtggagccatcgggtcgggtcccgaaagcagggagggtgcagagcccagcatgacgcctccctcctgtctcctagattaccagctccggacccagtgaggggctgtcgcagccaacaccccggcctcggggctcctggtggcagcaccaggggacacacctgccaaacccaccagatggaggggccctccctggtctctggccaccctcccagcctctgcccagggacccctgccttccccaggccatctgctctgccgtcgacactcgtctcagaagcccctttcccagaagaggctggtcttcaagaagtctcgtttctttgcccctgaagtcagtttcaggggaaggatgtgaaatttttccgtgtagaggttacagccttttatgctgttgagctcccaggtaccaaaaagcttggccaacgcttgccagccagccagctgcaggtggcatctgccacgaaggaagcgccagcctcgccaggccagcaggggcgtcgttttgttgccattttgttgaacgttatgggtttatgggtgttcctggaacttgtctttgtgcattcgttgctgtttgtgttaccctcactgtccccatgtcccacccacgtcctacggcactcaggaagcacttggtgaggacgagccctcacccttcttgtcttccttcccggcagcgcccgcagcgggccatttacacgtcgaggctggcacctggcgcgctcgggggccactgtagcgtctgcctgctccctggactcgcaggcctcgcctgtggcgccttcccagggccagcctgggtcacgagatgctgtcactcagccagatcagtattgacccaccaggggaggtggggtttggtgagagacgccagcctcagactttttcccactgagggtccagagagcggggccacgtgtcacccacgtctgcgcttggtcacccgtcctccccaccctgtgtgtgtttatgtcatagttacattaaattccattcattgaatactccacagccttcctctgatgcagcgtggtcccaactcctcctgcgtgaccacagggcttgcctggttttgtcgccgaccttccctgtggccccacgaggtgtcaccagctccctctgcttccccagctgaaacacaggaaaagcagctgcgggaagaggcagctgcagtgctggaccatgggccaccactcctgggccacacagaggaggccacagaggcagagtcttctctcatccaatctgctgcaccctcagatggccaacagcttgtccccacctctccccaaactgatggcccactcagagcatggtccttgtgtccacagcagcatcccctgtgtcctagctagaaatgcaggttcgtgggccagccctgacctgccaaagtggaggctctggggccagggtcccggaaaacattaacaaggcccccagatgcttcttctgtgaactgctacttggtccatgggggaaatagcacatatgcaggaagtgctgcctgctcttggccccctccccgaccagtgctgatggccctgcctggccagcaccctcttgccttcattctccccctccctctcctgtcttgccgagctcgtcctcaggtgtctagtgggcatccgacctaacagcctgagtagaaccttccgcccacgtaggtcttccccatctcagtcaatgacgctgccccagcccaggcctcagaccaaagccctgaaggcatccctggggcccctcccctcactgtccacacccatatcagcagccagccctcatggcccctccagaaaaccctggggctgaccccatttgccatcctcgctgccacccccggggcctagctccagtgtgggctgtcactgtccccaccctgtggagcccccatgctgggacaccgcagggacaggagagggctggtccacaggacagaagagagacttcagtttccagcaacttatcagataagacctgcaaaccctccactacagactgtagaaatgcaggaaatgaagcagacgcacctagccgtgcccataaaaaagcaaggagacccacaggagcccaagacgaaggaagtagacgcggaagacaccgtgggggctcacaccggagttgctcttggaaaccaccgggtttaggtttgggggccaggtggcagataggactttgggcatcgggaagatggtgaaatgcagtggagatgactcctgcgtgaagctgggatcctcgagggtcatgatacttaacagtaaaaagatggactagaaaaaacatttgccctccacccctgagaataagcactgtgtcctctctctgcctgagatccacaggagaaaaagtcaccactcatttagaccccacgcttgtaatatcaatctggtttgcagacaaccaggccaagatgtttatgacagaaaacctccctggagggacctaacttcatgccttgttacctaagatcctcgcacacaatagaccctcaacatgagggcacatcctgaaaattacaaaacacgtgcatgaaagcaaacttgaaacagcaggatcagatcctcacgaacttcaaagattatcggcatgtaaacaaatacactatgcagtcaatctgttgcaagtgcctaaaggcacagagactctgaatagaaaagagcaaaatgctgttaagacagagctgttacaacatccaacaaggcaaataatttgcatgcgggttataacgtctacaaatcagaaaaagagaacctaacaaaatgggctgtgtgtgaacagacagtatgaagaagatgaaatacaaatggcgaccgttcggccaggcgtggtggctcacgcccgtgagcccaatactttgggaagccgaggcagaccgatcactggaggtcaggagttcgagaccagcatggccagcatggtgaagccccatctatactaaaaatacaagaattagccgggtgtggtggtgcgtgcctgtaatcccagctactcagtatgctgaggcaggagaatggcttgaacccaggaggtggaggttgcagtgagccaagatagtgttactgcactccagcctgggcaacagagcgagactccgtctcaaaacacaacaaaaaccggcctagcgcagtggcttatgcctgtaatcccagcactttgggaggctgagacgggtggatcacctgaggtcaggagtccgagaccaacctggccaacatggcgagaccccatctctactaaaaataccaaaattagccaggcatggtggcgggcgcctgtaatcccagctacttgggaggctgaggcatcagaatcatttgaaccccaggaggcagaggttgcagtgagccgagatcataccacctgcactccagcctgggcaacagagcaagacttcatctcaaaagaaaaaaaaaaggcaaacgttcaaccatgtagctattcaggaaatatgtacacataaaccaagaccacagttagatgctatttgcatcatgtcggccccccccaaaaaaatttttttttttgagacagggtcttgctatgttacccaggctggagtgcagtggcgtgatcacggctcactgcagcctcgagctgccaggctcagccaatcctgcctcagcctcttgaggagctgggactacaagcacatgccaccatgctgggccaatttttcatattttttatagagatggggtctcgtcattttgtccacactggtctccaactcctgggcttgagccatcatcctgccttggcctcccaaagtgctgggattacaggcgtgagccacctcgccacgcctcctgaacatctagaacgtgctagctatgtactgactgtgggaaagttgagaacatcctccctgaagtcatctttatgccagaattctcttgcagaactctagttgagaaaagccctgagaagtccatgcaccaatatatagagaaatatcaggtgtacagttacacttacagcagcatagttcatgatagcaggaaattggaaagcaaccaaaagtccttcaataggaaaagggaccactgtagtccattcatgcaagagattacagcagtgaaaatgaattcaactagagcagtgatatggctcagaatacaacttaaacaacattgagcgggaaaaatgtttacaaaagaaaatgcagtaatctagtataaaatacggaaataatattttgcgtgcttagggatctatatatatccagcaaaagtctaacgagatgcttgagaatttgaaaaaattcacatccctggttatctctgaaaggcaaaaacaggaagggggtatgactggggcctctgctgtgttggcaatttccttaagcttggtattgcttagtggcttgttctgtattctttctttatgctttttttttttttttttgacagggtgtcactctgttgcccaggccaaagtgcagtggcatggtcacggctcactgcagcttcaaactcctgggctcaagtgatcctcccaccttggcctcccaaagtgctgggattacaggcatgagccacagtgcccagccctttttgtagttcttaatatactttttgtagtttttttgttttttgtttttgtttttgttttttttgagacagagttttgctcttgttgcccaggctggagtgcaatggtgtgatctcggctcactgcaacctccgccttctgggttcaagcaattctcctgcctcatcctcctgagtagctgagattacaggcatgcgccaccatgcctggctaattttgtatttttggtagagacgggatttctccatgttggtcaggctggtctcgaactcccggcttcaggtgatccgcccccctcaccttcccaaagtgctgggattacaggcatgagccaccgcgcccggccagttctcttttttttttttttttttttttttttttttttttttttttaagactgcaaagctgggcatggtagtatgcacctgtagtcccaactacttgggaggctgaggctagaggattacttgagcccaggagtttaaggacagcctgggcaacatagtgagaccctgtctctaaaacaaaccaacaaaacaccccccaaaaatgacaatgcagatttggaagaaaaaaatagattaaaaatgtagtcataggaattaacaacttggggccgggcatggtggctcacgcctataatcccagcactttgggaggctgaggcggccagatcattttaggtcaggagtttgagaccagcctggccaacatggtaaaacctgattgctactaaaaatacaaaagaattagctgggcgtagtggctcatacctgtaatcccagctactcaggtggctggggcaggagattcgcttgaacccgggagatggcgctcgcagtgagtcaagatggcaccgttgtactcttgcctgagcgacacagtgagacactgtctcaaaaaaaaaaattaacaacttggttggagggtgttaaaatacaagtgagacatagatgaagagaattagtgcactagaagagagctgtctgaggcagttacccgggacatagcacagctaatgagacatatatatatttacagtcaaccctccacatccatgggttctgcatccatggattcaaccaagagtgagttgaaaatatttgaaaaacaattgtgtctgtgctggacatgtacaggttttcttttttattgtcattattccttaaataatacagtataatgattatgtagcatctacattgtattaggtaatctagagatgatttaaagatgatgtgcataggatatatgcaaatattgtgccattttatataaaagacttgagcatcctcagattttggtatccaaggggagtcctggaagcaatcccttgaggatatggagggacgactctgtgtgtgtgtgtgtgtgtgtgtgtgtgtgtatgtgtgtgtgtgtgtgtgtgtgtgtgtgatgtgcgtgtgtggttagcacaagacaataagaaggcccaacatgccagcaagtatctaacacaaaccaaaaaatgagaactggggagcagccacatgcaaagagatcgtggccagaattttccaaaattaatgaaaatcttgaagtgttttttgtttttcattttgacggagtttcgcgtttgttgcccaggctggagtgcaatggcgaaatctcggctcattacaacctctgcctcccaggttcaagcaattctcatatctcagcctcccaagcagctgggattacaggtgcacaccaccacgcccggctaatttttgtattttttgtagagatggggtttcactatgttggtcaagatggtctcgaactcctgacctcaggtgatctgcctgcttcggcctcccaaagtgctgggattacaggcatgagccactgcgcccagcctgaaaatcttgaaattttaagatccaggaaaccgttgagtccaaagcatgatacacaaacctaaattcgtaactaaaataatcatagtcgaaccacagaacatatcagactcagggaagatcctaacagcaacactaagagattaaaatgtctctccaaagagcaattggacagagaactggtttcacaactggaacaacaaaagtccgaagatagagcatggcttcaaattactgagagaagtgcagtctagaattctgagcccacctcatctgtaaaaggtaggacaagccgggcatggtggctcccgcctgtaatcccagcactctgggaggccgaggcgggcagaggtcaggagtttgagaccagccggaccaacaaggagaaaccccatctctactagaaatacaaaattagccaggtgtggtggcgggcacctgtgttcccagctacttgggagactgaggcagacagaattgcttgaaccagggagacagaggttgcagtgagccgagatcgcgccactgtactccagcttgggcaaagtgagattctgtctcaaaaaaaaaaaaagacaagataaaaacaatttatcaataacagattccccgaaaaaaggaacttgtgtacataaggaaaggaagaaagatgtgagaaggaatgccggaaaaccttagaaaccattggatctgtctaaactgtcattgactgtgtaaagcaataataacagtgactaacgtatagagtagcgacaaaaggcgcaactgaagtactagacaacatcctggtgttcatgcctttcaaggtcactatgctatttgggaggagattcggctaaagtccacgagggccacgtatttatatataatttctagaccagtggttggaaaagggttgaaagaaaacttttaacagattaataggaagaaggaaaagagaaggaggcgtagaaaaatcaggaggcactgggcgcggtggctcacgcctgtaatcccagcactttgggaggctgaggcaggcggatcacctgaggttgggagttcgagatcagcctgactaacatgagaaaccccgtctctactaaaaatataaaattagccgggtgtggtggtgcatgcctataatcccagctactcgggagggtgaggcaggagaatcgcttgaacctgggaggcagaggttgtggtgagctgagatcgcgccattgcactccagcctgggcaatgagcgaaactccatctcaaaaaaaaaaagaaagaaaaagaaaaagaacaatcaggaggccaggttcagtggctcatgcctgtaatcccagtgctttgggaggctgaggctgagacaggtgaattgcttgagcctaggagtttgagaccagcctgggcaacatggagaaactctgtctctacaaaaattagccaggcatggtggcgcacacctgtagtccaaactactcaggaggctgagttgggaggatcacctgagttcaggaagctgaggctgcagtgagctgtgattgcaccactgcactccaggttgggtgacagagtgacaccctgcctcaaaaaaaaaaaataaaataaaggaaaaatcaggataaatgcagggatgttctaaactttttaaaataataaataatagtacttaaaactgcactgggacttttgggacacccctagcatctctggctgcagaaagcataaaataagattgtagaaataaatccagatattaggaaccacaacaggtgtaaatgaagcaaagctgctagttgaagatgttgtcggattgaactgaaatacaaaatcctgtgatatcctgtttatacgcgatacatctaaaatgtaagtacacaacacaattgaaagtaaaaaaacattaaaagatgtgacacttaaaatataagcacacaacacagttaaaagtaaaaagacattaaaagatgccaaaagaaatctcatatggttatattaattccagacagaatagatgtatttatttatttattcattcatttaattttttgagatggagtctcgctctgtcgcccaggctggagtgcagtggcgcgatctttgcttactgcaacctccgcctcccgggttcaagtgattctcctgcctcagtctcctcagtagctgggattacaggcatgcaccaccatgcttggctaaatttttttatttttgtattttttttatttttagtagagacagggttttgccatgttggccaggctggtcttgaaccctgacctcaggtgatccacccccactggcctcccaaagtgctagtggcaggtgtgagccaccacacacggccagaatagactttaaagcaagaaagcaaaagaaaaaatgtattagatccccgagaagtttccacacaactccaagaattattattagagttcccactctctgaggaattttcaagagaaattagttagaattcaacaagaaataaattactttaaaatatttccaaatatgagaggttttttttgtttttgtttttgtttttgtttttgtttttgttttgagaaagggtctctgttgcccaggctggagtgcagtcagtggcacgatgtcagctcactgcaaccttggcctcctaggctgaaatagtcctcccatctcagtctcacaagtagctgggattacaggtgagcaccaccaagctcagctattttttttttttttttgtatttttagtagagatggagttttgccatgttgcccaggctggtcttgcacttgggctcaagtgatccacctgcctcagcctccacagtgctggaattacaggtgtgagtcaccatgcccagccaatatgagagattttaaagcacatttttcaatcaccatgtgtcaaagaagaaaatataatggaagttagaaaatattagagaatggccaggtgcagtggctcatgtctataatcccagcactttaggaggctgaagcaggtgaatcacttgagctcaggagttcgagaccagcctggccaacatggcgaaaatccatctctactaaaaatacaaaaattaaccaggtgtagtggcacacgcctgtaaatcccagctactcaggaggctgaggcccaagaatggcttgaaccctggaggcagaggttgcagtgagctgagattgtgccactgcactccagcctgggcaacgaaacgagagtctgtctccaaataaataattagagaatatttttcaatctggatgcaggtgacatgggtgtgctctcgagaatccatcaagcattgatgatttgcacactcttttgtgtatatgttacacttcagcaaaaacattcacaaaggggaaaaaggcaaaagatacttaaagcagccagaggtaaagacacatcaccttcagacatgacaaccagacagacagacagctggcttttcaaaggaacccagaaaacagttgggtgacattttcaacatgctaaaagaaaaccactaacccaaatcagagacccagcaaaagtatttcaagaatgaggttacagtaaaaacattttgcagacaaataacgaaagagtttgccagcagcaggctaacactaaagaaaattgtaaacagtgtactcacatcaggcacaaggaaagtgatctcagacggaagggcatgatgcaagaagaaataaaagcaaagaagtagaaaatacatgagaaaatctagacaaagattgcataaacagtttctggagtttttttaagtgatagaattatacaacaggaaaaaaagtctgcagggagtaaactgagttaaaatgttccaagttaatgactgtctgggaggagaataaataacatggatacactttgggaggccgaggcgggcggatcacgaggtcaggagatcgagaccatcctggctaacacggtgaaaccccgtctctactaaaaatacaaaaaattagccgggcgcggtggcgggcgcctgtagtcccagctactccggaggctgaggcaggagaatggcgtgaacccgggaagcggagcttgcagtgagccgagattgcgccactgcagtccgcagtccggcctgggcgacagagcgagactccgtctcaaaataaataaataaataaataaataacatggataaaatttgttgtttgttgttgttgttgttgttgttgttgttgttgagacggagtttcgctcttgttgcccaggctggagtgcaatggcgcggtctttgctcactgcaacctctgcatcccgggttcaagctattctcctgcctcagcctcctgagtagctgggattacacgatgcgccaccaggcctgcctaactttgtatttttggtagaggcggggtttctccatgttggtcaggctggtctcaaactcccgacctcaggtgatccgcccgcctcggcctcccaaagtgctgggattacaggcatgagccactgcgcccagccaaatctgcattttgataagtatgcattttactatctaagggagctaaaacatttttattattttagcactgtaactttgcttttcttctttgttttgtttttttgagacagagtctcactctgtcgcccaggctggagtgcagtggcgtgatctcagctcactgcaacctccacctcctgggttcaagcaattctcctgcctcagcctcctgagtagccaggattacaggtgcacgccaccacacccagctaatttatgtaattttatagagttgtggtttcaccatattggccaagctggtctagaactcctggcctcaagtgatccacctgcctcggcctcccaaagtgcggggagaccagaattccacccagaatgacctctctgttcctaggagtgtgacagcatttgggggggaaaatagcgtagagttggaatttttaaaattcagtttgacaaaatgacttttagctggagcattaagtccctttacatttaatgtaataactgatattacatttaagtataaatttaaatctaccgtcttactttgttttctatttttgtcctttctatgttctcttttatgtcctctctggatttattacagattgtttgtggcttttaaaaaaagtcattgcttgaatgatgagagcttatatttaaaaaggcagggggctaaaataaataaataatttaaaaaataaaaataaagtcattgttttcctttgaatgtttgagagttacaattctaggctgggcgaggtggctcaagcctgtaatcccagcgctttgggaggccagcccaggtggatcacctgaagtcagcatcgtgaaaccccatctctactaaaaatacaaaaattagccgggcacagcggcatgtgcctgtaatcccagctactcgggaggctgaggcaggagaatcactcgaacctgggaggcggaggtttcagtgaaccaagatctcaccatttcactctagcctgggcaacaagagcaaaactccatctcaaaaagaaagaaatatatatgagtagatattaaatgtgtacacatatatacatatataaaggctaaaataatgatctaagcctccatctcaagaagttagaaaaagaacaacaaaataaatgtaagagcacagaaagaaggaaataatagggagtagatacaaagaaaatggaaaagaaacactcaataaagaaaatcaacaaagtgagtttatttaaaaaaaaatgaatgaaattgaaaaaccgctagggaaattgatcaacatgaaaagaaagcacacatagctgttactggaattgggttgggggagacattactatagatttaaagacattaaaacgattagaacaggacacatgtctagggttgtgtgaggtattcacttcccaagggtagagagcttctgctcaccaagctgtgatccctggcctagagttccagccacatagcgagaaaggggtttctttttctaattcacaaaacacgatacaggctagtggacccccaaataaaagaatatttagaataaaaccctatcaaaaaaaaaaaacaatagctagaacagtatgaacaatgctaggggctgggtgtaggtggctcacgccggtaatcccaacactttgggaggctgaggcagctggatcacctgaggtcaggagtttgagaccagcgtggccaacatgatgaaaccccgtctctactaaaaatacaaaaaattagttgggcatggtggcaggcacgtgtaatcccagctactcgggaggctaaggcaggagaatcgcttgaacctgggaggcggaggttgcagtgagccgagatcacgccactgcactccagcctgggcaacagagtgactctgtctcaaaaaaaaaaaactacacttgatcttagccaaaaggccaagacacgataaaataataataataataaatgatgctaaggaaaagagtgacttgctgaaggacgttgtccccattatgtgtgcaaagtttaaaattacatgaaacaaaatgatgtattatttatggccaaataataaaagatagagccatcatcagcatgtctgtgatggcctaagaccatcttttaataaagattgtaattcaggtcattcccctcccctgctcaaaatcctcccatggctctccagtgccctcagagtaaagtccccgctcccttgtcctccgggtccagctggtcctcctctggcttccactctcgcctttcctccctcttcacctgccactcgcgcctctttgccccaagcttgttctcacctcagaacctttgcagttgccagtgccttctgtctggtgcacccttgcctccgctgcctccttgaaattcattgctcaactcaagtgtcccctcccctccagccactccagcttgtcgaaacatgcagctgtgatttgttccacttttgctggcacacccctggtctgcctagaagttccacaaggacacccccgccccatctgatttgtcactgctgtgtctctagggtccagagcagtactgctctgggactgggatctggggatgcaaggctctgccagccgtgaccaccagggggcatccacgggtcagaaaccacggcttggagacccacccggccaggccacagagagaggtgtgcgggacaggcctgggaagagggagactccagccctctctgaacacagcgaccccaacaccactgctatccttcctgagggtcctccctgcagcctgatggtgaagatgaggaaactgaggctcagaaaggccacaggggacgggcgcggtggctcatgcctgtaatcccagcactttatcacttgaggtcaggagttcaagaccagcctggccaacatggtgaaaccctgtctttactaaaaatgtcaaaaaaaaaaaaaaaaaaaaagctgggcatggtggtgggtgcctgtaatcccagctactcaggaagctgagacaggagaatcgcttgaacccaggaggcagaggttacagtgagccgagaccatgccactgcactccagcctgggcaacagagtgagactctatctcaaaaaaaaaaagccacagaaatgtcaaacactccttccccctcctcacaggacattgacagggaagctacagatggagggtgggtggggacgctggggtccctggcctggctgggaggaccaagtcagggcagccaggctcagactgaccctgctgtccatgaggagcctcagctcacacaggcagcccaatccctgcctgggttcagcagctcccattgcacacatggggaaactgaggctcagagacaggctggagctggactctgtacaccagaacccggcaggtcctgccacaccattgctgcccaacgaatcctccccagctgccatctgtgctggggcttggggactcagtgtggacgacagcaggcgggtgcccctcacccacttcccaccagttccctattcaatagatggagaactgagtctgagcccacccagcttcatccaggggctacaaactcagactaccccccacaagaggaaacgcccagtggcctgcccctggagtgggtagggaagccccgtgttcaaagctgtgccccacaaacctggctccccgtgctgtgtgaccttgaacaggctccttgccctctctgggcctgtttctctgtccactgggggcctcttcatgccattttgttagaagagtctctaaaagaagaaaaagatcacttgtcaaccaattaagaactgctcagatgctctttctaagcactgaggttcttttacatgacacaaagaccctgatatggccagtgcgctgttgtttattgaaattgaggtgaaattcacataacacatggttaaccattttattttattttattttttatttgagacagggtctcactgtgtcacccaggctggagtgcagtggtgcgatcacagctcactgcagcctcggcctcctgggctcaagcgatcctcccacctctgagtagctgggacaacaggcgcatgccaccatgcctggctaatttttgtagttttgggtagagacagggtgtcactaggttgccagggctggtcttgaactcttgggttcaagcgatcctcccgcctcggcctcccaaagtgctgggcttacaggtgtgagccaccgtgcccggctacagttaaccatttgaaagtgaacaattcagtggcatttaggacatttgcaatgtcgtgcaacctctgtctgattccagaacatttccatcaccccaaaaggaaaccccgtccccatcagcaatcactcctcattcctcttccccagccccaggtaacaccaatctaccttatgtctctatggatttgcctgttctaggcatttcatatcaatggaatctcacactacgtggccttttgtgtctggcttctctcactcagcattgtggggatttatttgtttgtttgtttgttttttgagacggagtctcgctctgtcgcccaggctggagagcagtggcacgatctcagctcactgcaacctctgcctcccgggttcaagcgattctcctgcctcagcctcccaggtagctgggattacaggctcccgccaccacacccgactaatttttcgtatatttagtagagaaggggtttcaccacattggccaggctggtcttgaactcctgacctcaactgatccgcccgcctcagcctcccaaactgctgggattacaggtgtgagccaccatgcccggccaacatcaggtttttgaggttcacccttgtcacggcatggatcagcgctgcattcctttttacgggtgcataatatcccactgcatggataactcacattctgtgtatcagttcatctgccaacaaaaatgaaggctgttaccacctttcagacatcatgagccatgttatgaactttcacacacaagtgtctgtttaaacacctgctttcaattattcccggtatatacccaggaatagactccctggatcatatggtaatgttaggcttaactttctgaggaatttcacaatttcaccgtgtgtgtgtgagtatgtgtgtgtgtgtgtgtgtatgtgtgtgtgtgtgtgtgtgtgtgtgtgtgtgttttataaggcccctggccaaactgggaatatagtgcctagaaatttctggcaagttcttttctctgagcgctttcctctgcatcaacccgtccctcccaccagagcctgctcgaccctggctgaccatagtccccttccaaagcgaccccagcccgcccagcctcagggcagtatctgcacctgtgttatgtccccatcatccatgctttgaatgctactgatattttgtatacttaaagtgctacccaggctgggcgcggtggctcacacctgtaatcccagctctttaggagccgaggcaggccgatcacctgaggtcaggagttcaagaccagctgggccaacatagtgaaaccctatctctattaaaaatacaaaaaattggtcggacatagtggctcaaacctgtaatcccagaactttgggtggccaaggcgcatggatcacctgagatcaggagctcgagatcagcttggccaacatggtgaaaccccgtctctactaaaaatacaaaaattagtcagacgtggtggtgagtgcctgtaatcccagctactcaggaggctgaggcaggagaattgctcaaacctgggaggcagaggttgcagtgagccaagatcacgccactgcactccagcttgggcgatagagggagactcagtcttaaaaaaaaaaaattagccaggtgtgggggtgcgtgcctgtaatcccagctactcaggaggctgaggcaagagaatcacttgaacctgggaggcagaggttgcagtgagccgagatcagaccactgcactccagcctgggtgacagagcgagactccatctcaaaaaaataaaaataataaataaaataataaataaatatataaataataaagtgctgcccaaattgttttgttttagagattataaaaacagaaaaagggggtgggcacagtggctcatgcctgtaatcccagaactttgggaggccgaggcgggcggatcacgaggtcaggtgatcaagaccatcctggctaacagtgcgaaacctcgtctctactaaaaatacaaaaaattagctgggcatggtggtgggcgcctgtagtcccagctactcgggaggctgaggcaggagaatggcgtgaacccaggaggcggagcttgcagtgagccaagattgcgccactgcactccagcctgggcgacagagcaagactccgtctaaaaaaaaaaaaaagaaaaagagagatgacccatgacccatctctcttcttggagctcctgtgggctcaggctggagaaagttagtgggtgtgtccttctgattagaggacccctcaccacccagactcttctggcaatctccagcttattttacaaagcccagctctgatgacccctccttcaggcagccctcctggatctcccaggaaggtcctggctctggcttatccctgactattcagagctgggctgtgtcgtgaaaggcctcagtgctctcttcctttgctttgcctttttttttttttttttttttttttgagctggagtcttgctctgtcgcccaggctggagtgcagtggagcgatcttggctcactgcaacctccgcctcccaggttcaagcgattcttctgcctcagcctcctgagtagctgggactacaggcgtgcaccaccacgcccaggtatttttatttatttatttgtatttttagtagagatggggtttctccatgttggtcaggctggtctcgaactcctgacctcaagtgatccgcccgcctcagcctcccaaagtgctgggattacaggcgttagccatcatgcctgaccagttctctttctttggtgctcacccttttgtccaacaccccagagacgcttctgagacccatggtgcttgctgaaagcatctgggcaccttctcagtgctcagcccttgtccaggcccacaggcagctctctgcccagtctgagtgtcccctgaactctccagccccactcctgaccctcattcattcattcgtttgagtatttatggagcacctgctgtgtatgtacagagactcaactgacacagacagacaaaaccccagtcccggggagtcatgggatgggagacagatgaccttgactgtcaccacatggcacatgggttgtcgggcgggcaggcgcaggaggggaggcgaggacacagcaggatggagaccccaagtccctggagacggggccctgtactgggggctggggctgtgaggagggcacgggggagccacagcgggttctgggcgtcaaggccacctctggccgccgatgggagagggaggaacccgggcaggagggaggtcagggcgccagggcgggagcagggagcgatggtggggccccactggagagcgggtggggagggaattgtgggatttgggtgcagccagagagagtggaagaggctgaggccagcagggttgtgggggtggggaggtcatggggtgagggtggcgtggaggggcccccacaccctttgggcagcatacacatctgaccaaagattcagttcctcaaaaatgccacattggcgcgtgtgtgcacatgggcagagcatgcacacggacacgcacgacacacacaggcacacacacctgcacacagagacacacgatatacagagaggtatacagacaacacacacaacacagacacacacacacaacacatggatgcacacacacacagacacacaacacacagagacagagacacagagacaccacacaccacacacatacaacacagagacacacacataacatatgcacatcaaacacaactacgctcaacatagagacagacacacacagagacatgcaacacacagagacacacacagagacacacatacaacacacacagacacatacgcagagacacacaacacacagacacacagaaactgacaacagacacacatacaacacacacgtacaacacagagacaaacgcataacacagatgcacacatacaacactcacacacatcaaatacaactacacacaacacagagagacatacagcatacagacacacatataacacacacaacacatgtgcaacacagatataacacatagatgcacaccaagcacacacaacacacacagacacacaaaacaaaactacacacacaacacacagacacacaacatgcacagagacacaagcatacaacagccacagagacacacagacaccatgcatacaacacagacatacacatacatcgcttgaacccggaaggcggaggttgcagtgagccaagatcgtgccactgcactccagcctgggtgacagagcgagacaccgtctcaaaaaaaaaaagcccattttgcagaagaaaactgaggtcagagagcagaggcaatgtccccaagctctgaatagtcaggagtgagctggagccaggaccttcacgtggcagggacacagggcaaggactggcacgtgccagctcccaagacagcaggctgggagcctccctgcagcccagaacattcccatccccacggcagttcctgcagggcccctcccccgccccgcctgccctgacgctgagctgagcacatttcccatcccacccctggctctgttccattccaagagaaacaggttgcacctgcacagttcccagaaggccctgggcagcaggaggccagccacgtgagtgggtgtgtgtggagacgtgcagtcacattgcagcccccaccatgccactgcgcaggaggagcagggccacgggtaacagagccactaagaggggcgtgtggggcactgagcactcaagcactggagccagccagacctgagtaccacccaggctcagccacttgccagcctttacctcaaaggagggaggagggttttttttttttttttttttttgagagtctcactctgtcacccaggctggagtgcagtggtgtgatctcggctcactgcaacctctacctcctgagttcaagcaattctgtctcagcctccctagtagctgggattataggcatgtgctaccacacctggctaatttttgtatttttagtagagacagggtttcaccatgttggccaggctggtctcgaacccctaacctcaagtgatctgcccgcctcggcctcccgaagtgctgggattacaggcatgagccactgcgcctggccttcttctttttttttttttttttttttttttgagatggagtcttgctctgtcacccaggctggagtgcaatggcacaatctcagctcactgaaacctctgcctcccgggttcaagcgattctcctacctcacaggagggttctatgagggggcttgggagatgtgtgcaggaggggccccagcaggccgggagagctacataatataacataaagttcaccatttttaaagtgaacaatttggtggcattcagtacattgacaatgtcatccaaccatgacctccacttccaaaggagacctcatccccatcagtagccattccccattcccctcccccaacccctggcagccactcctctgcttcctgtccctatggatttgcctgttctgggcattttatatcagtggaatcctacaccgtgtgtccttttgtgtctggcttctctcactcagcaccgtgtttttgggggctcatcacgctgtagcatggggcagtgcttccttccttttcatggctgcattgtattccattgtgtggatgaaacatgttgtgttgacctgttcacttgttaatgggcacttgagttgcttccactttggggctattgtgaatagcgctgctgtgagtgcatgtgtctgtgtatgtgtgtgtctgtctgtgtgtctatgtgagtgtgtgtgtctgtgtgtctatgttgtgtgtctgtgtgagtgtgtctgtgtgtctgtgtatgtgtgtgtgtctgtgaatgtgtgtgtctgtgtgggtccatgtgtctgtgtgtgtacgtgtgtctgtgtgtgtgtgtacgtgtgtctgtgagtgtgtgtgtctgtgtgtgtgtgtatgtgtgtacaaggatttgtttggttcttccaacacactttttgtgttctatgaccaggagatccaagtaactcaggcccttggagggaggttctgatttactgaaaaaaaaaaaaaattccacattatactcatgacttgaaaaacattaaaagagaaccaaactggctggttgcggtggctcacacctgtaatcccagcactttgggaggcagaggtgggcagatcacttgaggtcaggagttcgagaccagcctcacaaaaccccatctctactaaaaatacaaaaattagccggtcgtggtgttgggcacctgtaatcccagctactcgggaggctgagacaggagaatcacttgaacctgggaggtggagattgcagtgaggcaatatcgcgccactgcactccagcctgggtgacagagcaagaatctatcaaaaaaagagagagaaagagagggagacccaaaccaacagttttccctcacccctcgcccctcagcccctccctatgttgcggctcaaaagccccaaacccaagccagggagtgggggaccagtgcgtgggcagacactgcatcctcaagggtgaaccatcccgggaaactgtagcccctctgatgggagggaaggagaggacaacctcagaacgtctcaaagccaggctgcttcgggtcacaggcctgagtcccaaagcaggactgagctggaggacacaaggacctccctgaagccacggggcaggcaggggcaggagacccagtttcagacccacctggaaccttgggagtggcctttagcttcccctctctgtgtggctgctgccaggctcccagcaccagacactggctcccaagtatccttctggtccctgaagttgggctgatgagagaaaaaggtgaaccctctcccctgccttttttttttttgagacggagcctcgctctgtcgcccaggctggagtgcaatggctccatcttggctcactgcaacctcagcctcccaggttcaagcaattctctgcctcagcctcctgagtagctgggattacaggcacccaccaccacgccctgctaattttttactttttgtagagatgggttctcactttgttgtccaggccaggctggtctcaaactcctgtcttccagtgatcctcctgcctcagcctctgaaagtgctggcattacaggcaggaagccactgcacccggctgaaaaacccttttagtatcagagcacaggggctgggtgcagtgacatcacacctgtaatctcagcacttcgggaggctgaggcaggagtatcgcttgagtaggagtttgagaacagcctgggcaacatagtgagacccccatctcttaaaaaaataaataaataagttaattaaccagacatagtggtgcatgcctgtagtcccagctactaggggggttgaggtgggaggatcgcttgagctgggagttggaaactgcagtgagctatggtagcacctctgcactccagcctgggcgacagagtgagaccgaccctgtttttttaaaaagagagagagagaatcacaatgtaagtgaatagtgtaatattaaatttcagcgtatccgttagataaagaagtgtgggtatgatgatttcgcagaacatagtgacaagaaatgtgtcacacttataccacattaaggatgttgaggccaggcgtggtggctcacatctgtaatcccagcactttgggaggctgaggcgggtggatcacctgaggtcaggagttcgagaccagcctggccgacatggtgaaaccccgtatctactaaaaatacaaaaattagccaggcatggtggcagatgcctgtggtcccagctacttgggaggctgaggcagaagaatagcttgaacctgagaggcagaggttgcagtgagctgagatcacgccactgcactccagcctgggcaacaagagcaagactccatctcaaaaaaaaaaaaaaaaggaagttgagttatgttactctttcatgctactttaattttgtttcacactatctgccaaaataaactctttcctataacttaagatgtgggtgtatatgtatatgtatacagatgtagatgcgtgtaatttattatatactgttaatttcactatttgggttgtaataacattattttgaaataaaaatataattgttcagattgtggggtacatctgaagcccttagtccttatcgtgtcctcttccggaagctgagatcttggtcagcaggtgcagaggaaagagccaggtttcagagccacagaatcagtttctcttggaatctcaggttccttctctgtgaaatggggatagtgacactctgactccaagcattcacacatgctgttccctcagcgtggtcatcccttccgtgtcatttgcctggagagctcctacatatcattaaaccccaactgtgatgtccctcctccaggcagctgccgcagacagatgctccaaattctctcatccccacccgccttccaaccgagccctgatcctgcaggctgtggccatctgtgtccagctctgtctccctgagactgggggctccttgaggactgggctaggggacacaaggggatggcgagtgttttataaaaatggagatgccaggctgggtgcagtggctcacgcctataatcctagcagtttgggaggccgaggtgggtggatcacctgaggtcaggagttcgagaccagcctggccatcatcgtgaaaccccgtctctactaaaaatacaaaattaaccaggtgtgatggcacatgcctgtaatcccagctactcgggaggctgagacagaagaatcgcttgaacccgggaggcagaggttgcggtgagccgagatcgcaacattgcactccagcctgggcaagaagagcaaaactccatctcgaaataaaaataaaaataaaaaataaatgaaatggagaccccagtaccccccgttgatagataagagactgagatttctagaggggctcagcttccctgggggacagctgtttagacccagagccaattttcaactcttgggcagccagactgcaagtccagtgctccttccaaaacttgtgtgtatggagaacccaccacctgtgccctgaccccctcctggttccccacagcccctgcccaggccaggacaccctgtcccctgggtgtccctgaggtcacagataaggccgctgggcccggctatcggcaggaaacatcttggcaggacaggaagcgcggcatgggtcagccgcgcctgcacccggctcagcctatcagcggccagatattttgggagccactatataaaccccaactcggctccaagctgttccccggggaagcctcaggcttcatgttctgcggcagccctgaggctgctggaacacggggcccgggaggagctcaggagctgagcgggacagagtgacaggggtggactccgtccgggcatcactgcaggccagagggtgctggctctgaatcgagctagcccctattcagtcctggtgcagacactctcacttgctgggcaagtggcttcaccgccctgtgcctcagtttccccctccccacatccctcctttgatcctgtcccagggaaaaacacacctccaggtcctggagccttttctgaagtttctgggccgacatctgagggccaacccactttctcccaatgcaaagcagggcccaggaatctgcatcttaaaacctgccttggccgggcacagtggctcacacctgtaatcccagcactttgggaggctgaggcgggtggatcatgaggtcaggcattcgagactagccttgccaggatgttgaaaccccatctctactaaaattacaaagattagccgggcatggtggctggtgcctgtaatcccagctactccggaggctgaggctggagaatcgcttgaacctaggcagcagaggttgcagtgagctgagattgcaccactgcactccagcctgggcaataagagcaagactccgtctaaacacacacacacacacacacacacacatacacacacacacacacacacacacaacagggatccatacgcaagcccaagcttctcaagttcaagaacatacggtgggtccagctcctccacccaaaaagttcagtggacaggcacccagcgtgacaccgcataactgctgaatttgagccacattataagaatgggctgtagttattcccattttacagaagaggggttgaggcccagagaggggcaggaagttgcctgaagccacacagcagcccagaggccacgccctatcagaatctccaccccgtgcacctctcaggagatgctccaggggtgatgtggccagccaacaagcagtggggttaggatttgaacccgggtctgcctgctccacgaccccttgttggcacagaacagtgccatcttgggcccagtgatgactgctctggtcctgaataacatgcatatttctcccaggaccagtaaaagtgaaacgaagaagtgaaataaaaatactcaagaactcactggggcccgcagccggctcctgacctcagagcctcggcctttcctggggagaggcaagggggcaggacggcagcgcgggcagaggaacccaagcgtggctatgtaaagtggccggcccagcacctgcgactgcctgccagggcaggtgatgaagcgtgcccggccggcccccaccccaggcagctgcagctggcaaaagggaacagccacaccacatataacctggcctgaactccacccaaaaccagagctcgaggcctggcccgtgcctggaaagccagttttggcccaatgactctgggcaggtcactgtccttctctggatctcagtctccccactggccacagaaaagtctcagcagtggcagaggctcctgcctgaccattctgaccatcccagaatggaaagggaaatcacctccctcattctggagcctatacctctaataatataacccatgggcctagcagcttgctgggcagctatgtcacaggcaatgggccccttcaggtgtccctgaagtcctcatccctgcccacctttctttaagatctggtggggactgggggtcaagatgtcttctagttcatgccacacaaccacttggctcagtttgctgccagggaggcactggactggcatctctttcctgacgacatgctcactgccagccggggcagcctagtgtgtggcttagtgaaagtgggtgcctccttcagagtggctcagtccccaccctgccctgctctgccatccagccacctgggactgctgacagagacctaagtcagtccttctctaggttaaatgccctaaagcctccagggccttctcccaggacaccacttagaagtgtgtatacacatacacacacacacaccatggtggtcttccccaaacctgccactatccatctatccccattttgaagtggcagggccccctgcctgacagcattgaccagcccagaatggagagggaaatcaccttccccattctggagtctatacctccagtaatgcaacccatgggctcagcggcttgctggacacctatgtcataggcaatgggcccgttcacgtaaccattcgtcaattccaaatattgagccccacaagggagctttgatgaaggtggtggggatggggatgtcttgtttctttttctctctcttttcttttttggtagagatgggatcttgctatgtacccaggctggacttgaactccccctggcctcaagcaatcctcctgcctcgacctcccaaaatgctaggattacaggcatgagccaccaagcccagccggagtgtcctgtttcttgagctggctgctggttacctgggcatagtccctttatgagaagttacagaactgtgtacctaggatttgggtactttaatgtctgtatgttttccttgaataaaatattttaaaagaagaaaaggaaagaaagcagtttgatgtctcggactgagaatgaaagctaagtagataataactaggtgaggtttgagggcatggatggattcgggaagggcactgcaggcaagaggcacggcgcggctaaggcctggtgtcctgaggcagccttggtgtttgagggacctggcagaggcccgtgtggctgggtgggggcagggaccagccatgcagaccctcaaaagccacagcagggtgcatggatgttaccccgagacaggtgccaagccgagaagtttaagtggaggctgatgattaagtggaatggacatgtggaagggcggttgaagccatgagcaagggcatttatgattgagtggtaaagggttgctcagcccatctgccagaggggaatactgaggcccggtgaatccaggctgcttggctacaagtaggaggtggaggggcaatgtgagcctggcccagctcgcccaagggccactttctcccagctgcacccacttggagagtggtcacaacctctgtgcccaagaatcagccagatctcccaagtttgagtctcactctgagctcactggcctcagtgtcctcacctgtcaaacgggggcctgggagggtgagtctcatcttcgacccctctgcaggcagcccagcgactctttaccacggatttcactgcgattccagccaagagtgcctgggcagtggagggggcatttcataacccgagcactgcagaggtggcttttctgagaagcccggccccaaggaggaaactctctgatcttcgaatgccgtgggggtgggggtggcaccctcagcttgcaccaggaaaaactctgggggaaggggagaaggtaggagttctaaaaagaaataactcagtaatgcaaattcagccgcattgggggaaatggaagaagtaaaaaggcactgatgagaagggactcgtgccacacgcagggcagggggttcggggacaccatctgggcagatcaccacccaggcacccttgccacagctcctggccttacctcgagcctttatccgggctgcaccttgacctggggtctccttcccctaaacctccccatagggaatctttctcttctctgacccctaaaggcgacctcataccctttcaccagtcacacccagttacactgtgtcccccagctcctggccatcactaagccaccttctgtctctacagatttgcctgttccagacacttcaggcccctcagtatcacccccactgtggtcttgtcttcaactgtggtctctccagagtcaccttggttttctgccttttgctcgtccatccccaccgctacccgtgggagggcaggacccagctggctttctccctgcttctccatccatcctacttctgactccccagcctggagcctggcaccgaaaggcgctcagtaaatatttgctggctgaatacacggggtcaggcccaccttatctttagcagggagtgttatcagcttggctcgggaccaaactccagctcagcttgggccatccctcctacaagccccagttcttctcagctaaacaacaggtctggggggtgacacttctcgccaggggtccccaaagataacccacagcacatagaaagccaggcacacctggcatggcgcagtggctcacgcctgtaatcccagcactttgggaggacggggcaggaagatcacttgagctcaggagtttgagaccagcctgaccaacatggtgaaaccctatctctactaaaaatacagaaattagctaggcgtggtgaaaggtgcctgtaattccagctactcaggaggctgaggcaggaagatcgcttgaacccgggaggcagagtttgcagtgagctgagattgcgccactgcaccccagcctgagtgacagagcgagactgtctcaaaaaaaaaaaaaaaaaaaaaaaaggccaggcacaccggagatacccagccactgtcatttcccccaggggtgtccccttgctgatccctggatggggctctgtcttcctcccccaccaggcaaagagaggataaaagtgaccagtgaggctctgaaggtgctgggttctctcccccacctccagctctttctaagaagccaatggtgataacattcccccaaaacaggaaccagcgaggggcaccctgtgttgcagaaacctcccgcagaagctgcccacccagcccccgaccccacggccggcttcagggcccgctgggcacagcctggaaagatttttatgtaaaagtggtcgatgcaaatccagaaacctggggaccatgaaaagatccacttcccctttaacccactctggcctgagttgctgccacctgggcacggctgctggacataggcctccctgacccccgctcccgtttgccaagccggcttccagcacccacagcgcttaggacttgctctgcgcaccggaggccccaaatcctggttgctgggctagaggaacagggagcaggaacggctcatgtagacccccaaaccccctgccctgaagcaggaatgatcccagcagctagatctgactttttttttttttttttaagacggagtcttgctctgtcgccagactggagtgcagtggcatgatctcggctcactgcaacctccgcctcccaggctcaagagactctcctgcctcagccttccaagtagctggcattataggtgcccccccacttcgcccggctaatttttatatttttagtagggatgggatttcaccacattggccaggctggtcttgaactcctggcctcaagtgatctgcctgcctcagactcccaaagtgctgggattacaggtgtgagccaccgtgcctggctgctagctctgacttttaaaaaaaaattgagataaaattcacacaacataaattcaccattttattttgatttttttcagacaggattttactctgtcacccaggctggagtgcagcaggttcatcatggctcagtacagacttgacctcctgtgctccagtgatcctcccacctcagcctcccgagtagctagctgggactacaggcatgcaccaccacacccagctaacttttacattttttgtagagacggggtcacactgttgcccaggctggtcttgaactcctgggctcaagcgatcctcctgcctcggcttcccaaagtgttgggaatacagacgtgagccactgcacctgggttgaatttttaaatttttattttatttatttatttattttgagacggaatttcactctccttacccaggctggagtgcaatggtgtgatctcggctcagggcagcctctgcctcccaggtttaggtgattctcctgtcttagcctcctgagtagctgggattacaggcgcctgccaccacgcccagataattttcttatttttagtagagatggggtttcaccatgttggccaggctggtctcgaactcctcacctcaggcaatgcactatctttggcctcccaaagtgctgggattacaggcatgagccaccacgcccggccaactttttaaaaaattgaaataaaattcacacaacacaaaattcaccatttgctttaaagtatatgattcagtgggtttggggcacactcatgaggttgtacaaccatcacctatacctaatttcagaacattttatcccctcaaagggaaaccccgtctccaactgagttggccacctcagaagtgactgagaagcagtcacttatccccctccccagaaccctgacaaccacaaatctgctttctgtctttggattcgcctgttttggacagccatgaagtgggcaaaataacattgagtgaaatctttgtgatggagaaaaataggtcatgacatggtaggtgggacccggagggtcattttagccgagaaggtcaaggaggttctctctgaggaggtgacatttaagctgagaccagcaggagataaaggagtggctgaagggaacagcatttgcagcagagggaacagacagtgccaagaccctgaggcaggaccatgcctggtgtgatcatggaactgtggggaggctggtgtgttggggaggctggtgtgcaggaggagatggggtcacagggtggccggggccagaccacagagccttgagggcctcagtgagaggtttgtgttttgtcttgttttgttgtttgtctgtctctgagatggagtctggctctgtcacccaggctggagtgcagtggtgcaatctcagctcactgtaacctccacctcccgggttcaagcaattctcctgcctcagcctcctgaatagctgggattacaggtgcgagccaccatgcctggctaatttttgtatttttagtaaagataaggcttcaccatgttggccaggctagtctcgaactcccagcctcaagtcatccgcccacctcgtcctcccaaagtgctgggattacaggtgtgagccactgtgcccggccaggtttgggttttatttcaaacctgggacagggctccgttctccaccactgctctaaaaatatttattgaaagaagagggacataccacagagtcagccctacctttggtgcttcaggccttcaaatggagaccccagggtgcaaggaattcaggtctttgcagaccttcctgtggaagatggaacagtgtgaaactgcatggaacagcatggatgcatttgggaactgcgtggaggctctgtctcctgtaaggcagaactgagttggccgccccagggactgagtccctggccacctcctgccagccacaaagaccgtgctgcccacgacgtgctgttgcttcatggtgacttgactgtgatacaaagaggccaccaacctggacagggaaacctgagctttctgcaagctccccagtaactccaggcctgacaggggctcacttcaatacccccagcccccgtctatgaaataaagggtgtttaggatccatctggcaacggacacccactcgcccaggccagacctagggaggggcacagggaccaacgaggcctcagtttccctatctgtgaaatggacagaaaaagccccgcggcgcatcataacaacccaccaggtctattgtccagccctgggggcccccacatccctctgagcagctttggggtccccaatttccttcccccaagcacacacgcactgtcctctgcccctgaccgcagccgggtcctgatactgttttgttctcaccctgctctcctgacctggtgccaccagtttggtgtcttaaaaaaccacaacttagggtgctgttatctgctatcagtggcgggacgcggtggtttcggggcccctccgtgcacttctcagaagagccagccatgtcatcgcagggtgcttggcacaaagcagcttgtttatcaggccccctcatcgcgatccctgctgataagggccttcaaggcgcccgacaacttgtttacgggccttgttttcagagattctccatttgatgtatcccggtcttgcagcccaggggtcagggcattggggaggggggaagcagggctgggtcgaggggcttctgggaagacttcctggaggaagggatgctggaagggagcgagggagggttagttgcagaagatggggtaggcattgcaggtggaagaacctgcatgggcagaggtttggagataagaaccttgtgacaggctgggggcaggggctcatgcctataatcccagcactttgggaggctgaggtgggaggatcgcttgagtccagaagttcaagaccagcctggccaacatggcgaaaccccatctctacaaagaaaaaaaaaaaattagccaggcagggtgcgtgcctatagtctcagctacttgggaggctgaggtgggagaattgtttgcacttgaccttgagaggtggaggttacagtgagccaggatcacaccactgcactccagcctgggtgacagagccagaccctgtctcaaaaaagtaaaaaaaaaaaaaaaaaaaaaagagcttctggcaaagtcaggttaattaatgagctggggcttatctgaagagcaatagggatttggcagggtttaagctggggagtggggaggttaagagccagggtgaagtttgaatcctggttctactcccagcttcagttttctcatctgtgaaatggggatggtgtgaggattcagtgacaccattcaggaggggacgctggggagaagccacaagcaggttggatgggaggaggagggcctggcaatgccagggaatgcgtagagccagaaagctgattagtagttgcttaaggctgggggctgggatgggaacaggatggaggttgatagctaaaggggaaggggtttccttttgaggtgattaaaatgttctcaaacaggccgggcacggtggctcacacctgtaatcccagcactttgggaggccgaggcaggtggatcacttgaggccaggagttcgagaccagcctggccaacatggctaaaccatgtctctactaaaattacaaaaattagctggacatggtggcacatgcctgtaatcccagctacttgggaggctgaggcaggaggattgcttgaacctgggaggcagaggctgcagtgggccaagattgcaccaatgcactccagcctgggcgacagagagagacaccatgccaaaaataaataaataaataaataataaaataaaatgttcccaaatggagtggtgatggttgcagaactctgtgaataccctaaaacccattgaattggaatctttgttattattattattattattattttgagacagggtctcactttgtcacccaggctgtagtgcagtggtgcaatctcagttcaccgcagtctcaaccttccaggctcaagcaatcctcccacctcagcctcctgagtagctgggactacaggggtgcaccaccatgtctggctaattttcttgcttgcttgcttgcttgcttttttttttttttttttatagagatggggtctcactgtgttgcccaggctggtcttgaactcctggcctcaagggatcctcccgcctcaacctcccaaagtgctgggattacaggcatgagccaccacgcccggctgagctggacactttaaatgagtgaattgtgtggtcgatgcattatatctcaacaaaactgttaaaaaacaaaacagacaaaagaagatcaagaaggcctttttcactttagcaccgggaaacccaggaggcagctctgaacctctggatagaaggcattttgggcagcggctgaaggaggtaggtactgagctccttgtcacctaagccatgaccaggtgagctcctgctgggagccgcaaccacccagctgctcctccgcttctcccagcaggaaaggtgccaggggctgcccctcagatgtggcaacaggagctgggccccccacccgcccacactggggtttctgcgcctttgctacctgtctacctgctaagccacttcctccgcccacccaccagcccgtctgcctggcgcctggcttccccggctccctcgtccgccttgcctgcatccccctacccacctggcttcctcgtgagctgcccatgtaggcaggactgggagaggaccctcctccaaaagccaggatcggagcccagcttagccattgactctctggagctccttcaagaagtgagccttagtttatccgcctgagcaatgggactaaaaatatcaacctcgcaggatggctgcgaggctcagggcctttgcactgtccatcccccccccctgctgggggcaccttctagaatcttcctggaggttgccactggcctctctctcctcctgggaaaaaccctccctgactcccccagctaaatgcaccaatgggccctcttttcccctcgcctcaattcattttttgccctggaacctcagtacctagagctttatttatttgtttattatttttatttttattattattttttgagacagtcttactctgttgcccaggctgaaatgcagtggcgtgatctcggctcactgcaatctctgcctcccgggttcaagtgattctcctgcctcaggagaatcccaagtggctgggattacaggcgcccgccaccacgcccagctaattcttgtatttttagtagagacgaggtttcaccatgttggctagcctggtcttgaactcctgacctcaggtgatccacatgcctcggcctcccaaagtcctgggattacaggcgtgagccaccatgtccagccaataagcagtcccagagctctattgatgactgtttgccagtctactgcttgcatctaacctgagagctacatgaggacagagactgtgcctgtctcaggggcacaggagtggctcagggactgttttgttttgttttgttttgttttgagacagagtttcgctcttattgcccaggctggagtgcaatggcgtaactcggctcactgccacctccctgtctaaggttcaagcgattctgctgcctcagcctcccgagtagctgggattataggcacccaccaccacgcccagctaattttgtatatttagtagagacggggtttctccatgttggtcaggctgttctcgaactcccgacctcaggtgatctgcccgccttggcctcccaaagtgctgggattacaggcgtgagccactgcacccagctgggacaatttgttcaatagtgagcaaagtgtgtctggggaattgtgtgccaggttcagagggagagctgggagcagcagcacacacctgtagtcccagctactcgggaggccaaggcaagaagatcgcttgaggctgagagtttgaatccagcctgggcagcatagggagacctcatctctttttttttttttttttttttttttttttgagacagagtcctgctctgtcccccaagctggagtgcacaatctcagctcactgcaacctccacctctcaggttcaagcgattctcctgcctcagcctcccaagtagctgggattgcaggcatacgctaccatgcctgggcaatttttgtatttttagtagagacggggtttcaccatgttggtcaggctggtctcgaactcctgacctcaaattatccacccacctcagcctcccaaagtgctgggattacaggagtgagccaccgcgcccagccaagaccacatctcttaaaaaacaaaggcctaggccaggtgcagtggtgcatgcctgcaatcccagcactttgggaggcccaggcaggaggatcgcttgagttctggagttccagaccagcctgtgcaacatggcaaaaacccctctctacaaaaaatacaaaaattagctggacgtggtggtgtgtgcctatagtcccagctactcagtaggctgaggcaggaggatcacttgagcctgagagcttgaatctggcctgggcagcagagtgagaccccatctcttaaaaaaagaaaaaaaaggcctggtgcagtggtacaagatcacatctgtaatctcaccactttagaaggccaggagcttgagaccagcttgggcaacatagaaagacctcgtctctacaaaacataaaaagaaattagccaggcgtggtggcgcgtgcctgtagtcccagctacttgggaggctgagatgtgaggatcgtttgagcctaggaagttgaggctgcagtgagccgtgattgggctgctgcactccaacccaggcagtgtagagatcctatctcaaaacaaaacaaaaacaaaaaaggaaagattgcatgtggtcttatagcaaagctgacaagaaaacgttcaggaagagaaggaaaatttcttgtgagctttcaaaatacaccctgaaacctcaaataaattctctgcttggggagagatctagacacctcccactttcctttctttttttttttttttttttttgagatggagtctcacccagtctcactccagtcgtgcccagtctcactccagtctcacccaggctggagtactggagactggagtgtagtggtgcgatctcggctcaccacaacctccacctcactggttcaagcgattctcctgcctcagcctccccagtagctaggactacaggcgcataccgccatgctgggctaatttttgtatttttagtagagacagggtttcactatgttggtcaggcttgtctcgaactcctgaccttgtgatctgcccgccttggcctcccaaagtgctgggattacaggtgtgagccaccgtgcccggctattttttttttttttttgagacaacgtctcgctctgtcacccgggctggattgcagtggcacgatctcggctcactgcaacttccacctccgggttcaagcgattcttgtgtctcagcctcctgagtagctgggattataggtagctgccaccacgtctggctgatttttttatttttagtagagacagggtttcgtcatgctggccaggctggtctcgaactcctgacctcaggtgatctgcccacctcagcctctcaaactgctgggatgacaggcgtgaaccaccatgctggcccttcattcctttttaaggctgaataatattcccttgcacggatgggccatgttttgctggtccattcaccctttaatagacatctgcattgctcccactttttggctattgtgaataatgctgctatgaatattcatgtccagggatttatttgaacacctgtttccactcttctggggatatacctaggagtggaattgctgggccatatttatggcaattctgtgtttaacttttttttttttttgagacaaggtctcactctattgcccaggctgaagtgcagtggctcaatcacagctcaccatggcctcaacctcctgggttcagctgatcctactccctcagcctcccaagtagctgggaatacaggtgcatcacctcgcctggctaatttttttatgcttttcatagagacagggtttcaccatgttgcccatgctggtctcgaactcctaagctcaagcaatcctcctgcctcaacctcctgaagtgctaggattacaggtgtgagccactgcacccagcctgtgtttaactttttgaggacctaccaggcttcaacgacagcatcatttgacattcccaccagcaatggctcagtagttttgaacccttatggctttcaactaactaggacccaagttcaaatcttggcttaaccactgtgaccactggatccttttctttcccatcatgcatcttgcttttcctggtagcaacacccaattctgcctctaggaacccacctgtctcagcatggccagcggggctatcaatcctagaggttcacactcaatgggctgggggcaaatttggggaaccaagaggtgactcccctacctaggaaaattcacaagaacaaggcaggtctaattgagattcacatagggggaggagagagaaggcggccttggcagctgctagggcctcctgagccagcaagattttaaatatgtttttgcacaaaaatagacggatagaccttcaaacaagaagaaaaaagaacctgtgtttagagctgcgagctgagtgtttaggcagctgacagcatttagcctggaacgaactatccaatgcaagtgtgtggttagggtcgtgttcaaaaatacggcttcgaagcagcaaacccggggctgggccactcgccctgtaattctttttccaaataaaaggcagaactattcctggctcggcttggggacttctgcggctgccggggctccaaggaggccagcctggaatgtcaagcatggctctcgccccgccaggctcaggcctatgctgcttgggagcctgtcattgtatgactttttaattaaaacgtgattcccacagggccctgtccgagcccaggactccttcacaggaggcccctgggcttgtggcaaagcgctgggacttgtgatgtttggtagcatgagccaatttggagctatttgtggagtggatttaaaaaaaacaacaacaaaccaaacaaacatcacttgatgtttgccaaatatagcattttgcatttctataagcaaagccctaattttttttttttttttgagacggagtctctctattgtcacccaggctggagtgcaacggcgcaatctcagctcactgcaacctccgcctcccaagttcaagcgattctcctgccccagcctcccaagtagctgggattacaggcgcccaccaccactcctggctaattttttgtatttttagtagagacagggtttcaccatgttggtcgggctggtctcgaactcctgacctcaggtgatccacccgcctcggccttccaaagtgctgagattacaggcactgtgggccaccatgcccagcctgatttttttttttttttaagagacagagggagagctctgttgcttaggctggagtacagtggcacgatcatggctcaccacagcctccaactcctgggcttgagtgatcctcctacctcagcctcctaagtagctgggactacaggcatgcaccaccacatttggctaattttattttttattttttgtcgagatgggggtcttgctgtgtttgcccaggctggtctccaactcctgacctcaaggcatcctcctgcctcagcctcccaaagtgctaggattacaggcgtgagccaccgcacccagcctaaagccttgatttttaaaaagtaatgtacttggccaggcgcggtggctcacgcctgtaatcccagcagtttgtgaggcagaggtgggtggatcacgaggtcaagaagtcaagaccatccttgccaacagggtgaaaccccacctctactaaaaatacaaaaatcagccgggcgtggtggcgctcgcctgtagtcccagctactcaggaggctgaggcaggagaatcgcttgaacctgggaggcagaggttgcagtgagccaagattttgccactgcactccagcctggagacagagtgagactctgtcccaaaaacaaacaaaaaaagtaatgtacttaatcagatatagaaaggaaagaagcactgatccattctacaaggaggatgagctcgaaaacataacgccaaatgagagaagccagacaccaaggccgcgtagtgtgagattccattgatatgaaatgcccagaacaggcaaatccacagagacagaaagaggaagaagaggaagcatggttgccaccggctgtgggggagtggggagtgattgctgatggggacaaggcctgcttttggcagggatgaaagtattttggaattagatagaggtggtggttacacaatattctgagtgtactaaatacctctgaattactcactttatttatttttgtttttatttttattttattttttgggacagagtcttgctcttgtcgcctaggctggagtgcaatgatgcagtctcggctcactgcaacctctgcctcccaggttcaagtgattctcctgcctcagcctcccgagtagctgagattacaggcacccgccaccacacccggctaattttttgtatttttagtagagacagggtttcaccacattggccaggctggtctcgaactcctgacctcaggtgatctgcctgcctcggggcagattctaaagtgctgggattacaggcgtgagccactgtgcacagcctgctgactttaaaatgggtaattttatattgtatgaatttcttaaaaaaaaaaaaagccaggcacggtggctcatgactgtcatcccagcactttgggaggccgaggtgggaggatcacaaggtcaggagtttgagaccagcctggccaacatgatgaaaccccgtctctactaaaaatgcaaaaattagccgggcatcgtggcaggtgcctgtagtcccagctactcgggaggctgaggcagaagaatcgcttgaacctgggaggcagaggttgcagtaagccgagattgtaccactgcactccagcctgggcaacagagcgatactccatctcaaaaaaaaagaaaagaaaacaaaacaaaacaaaaacggcatgtaacttggggagtggtaagaacagaggctctgggtctaaatcctccctggcctgccagtgaccagctggtgggcttaaagcaacaatttagcattctcagatctgaatctgccatctgtaggcagaatggggatactgaggctgggcctcaggaagaccaccgccatctgccacccagctcactatagtcaaatttccccagcttccccagtaacaacctttatggccactttttcctttttcacttaggatccgatccagactcacacattgcccctggggcttctgtttcgttcactacctttcatcaggaaccatgctgcagtctttcccagcctttcacgacatggacattttggtggagttgaagtcagttgttttgtggaacatatcccagggtgctggcctgatggttccctgtgaccaggtagagggtgtgaatttggggcaggatccacagaagcaatagtggatcttccctggtgcgtcgtatcgggaggcacctgacattggcttgtccagttactggggatgttaactgtagtcttatttttttctttttctttttctttctttctttctttctttctttctttttttttttttttttttttttttgagatggagtctcattctgtcacccaggctggagtgcagtggcacaatctgggctcactgcaaactccacctcctgggttcaagtgattctcctgcctcagtctcccgagtagctgggattacagctgcctgccaccacgcctggctaatttttttatttttagtagagacggggtttcaccatgttggccaggctggtcttaagctcctgaccacccacctcagcctcccaaagtgctgggattacaggcaggagccaccatgcccagtctctctctctctctctctctttttttttttagagacagtcttgctgtgtcacccaggatggagtgcagtgacacaaacatagctcaccttagtctccaggtcctgggctcaagtgatccttctgcctcagcctcccaagtagctgaactacaggtgtgcaccaccatgccctgctaatttaaaaaatatgtatttctttgtaaagaaagggggtctcactgtgttgcccagtttggtctcaaactcctagcctcaagaaatcctcctgcctcggcccctcaaagtgctgggattacgggtgtgagccactgcgcccggccaaatgtgctcttatgattcaggcgatgggattatatgtcttaaaatcttcccagagcagggaccccaatgtgcaggaggagctagaaatgactcccttaaatctcttatctgcagagccccgctggccccagcctccattctgtctcagggctccctcactgccatgtcttttccttttttctttcaaaaaaacatctgcaagtaagcccaatgtctgatcgggccaggtgacacggagccagcagggccagggatggcttagacccttttctgagccagaagaggggaccatgtgagggcagatgagatgcattcccagagacttcctggaggagatggcctctgagccacatcctagaaatgagctgcaccttagtgccatttcaagggttctggggctcccggagaagtctccaggggcctttttctgtctcacccagtaggacagcccaggggttcactggtcccctgtcaggggctcatctggactttcgccatcagatgttagtggcagtttccccatgcggtggggaagcacattcatgcccccatcatcagggaacagaccactctgccttctttgaagtttacgatctacaggcaactggatttgaatctctgattttatccctgcctctctggaggctgaaccacaggcctctgtgttcagtccctgcctgggagctattttgggatctcaggtctgtaatttttgctgctcggggaaagccttggcaggaatatggggggcagagaacggagggacagatggctggcttccctcaccaagcctcagtttacccatctgctaacgggggtgagtaattcacacctcacgggagggcggtgaaaaatctgttcaatgctgggtatgaaatgacatcctggagacagcctccatcagggtttctttgtttctctgttttgaaacagggtctcactttgtcacccaggctggagtgcagtggtgctgattcatggctcactgaagcctccatctcccgggctcaagtgatcctcccacctcagcgtcccaagtagctgggaacacaggttcatgctgccacacctggctaatttgttttttatttcatttcatttcattttatttttttgagacagagtctttgctctgtcgcccaggctggagtgcagtggcatgatctctgctcactgcaacctccgcctcccgggctcaagcaattatcctgcctcagcctccctagtggctgggattacaggcgcctgccaccacgcctggctaatttttgtattcttagtagagacggggtttcaccgtgttggccaggctggtctcaaactcttgacctcgtgatctgcccacctcggcctcccaaagtgctgggattacaggcgtgagccatcatgcccagcccacctggctaatttatttttaatattttcatagagacagggtctcaatatgttgcccaggctggtctccaactccttggttaaagcagtcctcccaactcggcctgccaaagtggtgagatggcaggagtgagcttctgcacctgggcacactcagggttttgtctattcttgtgtggagggggatgtctgctcctttttttttttttttatggaggctcgctctgtcgcccaggctggagtgcagtggcacaatcttggctcactgcaagctctgcctcccgggttcatgccactctcctgcctcagcctctcgagtagctgggactacaggcgcccgccactatgcatggctaattttttgtattctttagtagagtcgaggtttcaccatgttagccaggatggtcttgatctcctgacctcgtgatccacccgcctcggcctcccaaagtgctgggattacaggcgtgagccaccgcgcccagcctttattttttactttttttaattactattttttttgagatggagtttcactctatcactcaggctggagtgcaacggcgcaatcttggctcactgcaacctctacctacttcccgggttcaagtgattctcctgcctcagcctcctgagtagctgggactacatgtgcgcaccactatgcccagctaattttgtttgtgtgtgtgtgtgtgtgtgtgtgtgtgtgtttagtagacacggggtttcaccatgttagccaggatggtcttgatctcctgacctcatgattgcctgcctcggcctcccaaagtgctgggattacaggcgtgaaccaccacatccaggtaatttttgtattttcagtagagacagggtttcaccatgttggccaggttggccttgaactcctaacctcaggtgatccgcccaccttggcctcccaaagtactgggattacaggcacccaaagtgctgcacccggcctctgctccctcctctacctcccatcaaaaataggcaagtgagattggtcaactggggggtaattttaactgctgacaccaggcaatgtctggagacatttttggttgttgtagaaaatctggggaggggatgttactggcatctggtgggtggaggccagggatgctgctctgcagcctactgggcgcaggatggccccacaaagagaataatccagccccgaatgtcagtggtgctgaggataggaagttacagcacccaatactgtatttcccatgtatccagatgactcatggttggtgactttgtaatttgatttgatgtgatttgtatatgagtcaatgttacacgctgctactgtttgaatgtttgtccactccaaaagtcaaggagggctgggcacggtgactcatgcctgtaatcccagcactttgggaggccgaggcaggcaaatcatctgagctcaggagtttgagatcagcctgggcaacatggtgagatccccatctctactaaaaaacacaaaaaattagccgggcatggtagcgtgtgcctataatcccagctactcaggaggctgaggcaggagaatcacttgaacccgggaggcagaaattgcagtgagccaggctcatgccacggcactcgagcctggggaacggagagagactctgcctcaaaaaaaaaagaaaaaaaaatgctgggcacgatggctcatgcctgtaatcccagcactttgggaggccaaggtggacagaacaccaggtcaggagatcgagaccagcctggccaatgtggtgaaatcccgtctctactaaaaatacaaaaattagctgggtgtggtggcaggtgcctgtaatcctagctactcagaggatgaggcaggaaaatcgcttgaacccaggagacggaggttgtagtgagccgagatcgcgccactgcactccagcctggcgacagagcgagactccatcagaaagaaagaaagagagaaagaaagagaaagaaagagagaaagaaagaaagagaaagacagagagaaagaaagaaaaagaaagagaaagaaagaaagagaaagaagggaaggaagaaagaaaagagagacttaatcctcaatgtggcagcattgagaagtgagacctttaaaatcatgattagattagattatgattagattatgttatgactggggccaggctcggtggctcatgcctgtaatcccagcactttgggaagccaaagcgagtggatcccttgagcccaggagttcaagaccagcctgggcaacatagtgagactctgtctctgaaaaaaaaaaattaagaaagaaagagttgaaagaagaagaaagatctgagatagcaagttagcatgcccagactcctctccagaaagtccccaccaggaggaagactctcaccagaactgtcccttgaccttggacttccctgcttccagaaattaacaaatacattttgtttctttacaaatcacccatcttcaaggccaggcactgtggctcatgcctgtaatcccagcactttgggaagtggagacggatggatcacttgaggtcaggagatcgaaaccagcctgaccaacgtagtgaaaccctgtctctactaaaaatacaaaattagctggacgtggtggcgcatgcctgtaatcccagctactctggaggctgaggcaagagaatggcttgaaccggggagacggaggttgcagtaagctgagattgcactattgcactccagcctgggcaacaagagcaaaactccgtctcaaaaaataaaattattaatattaattaaattaattaatttattaaatattaagctgcttttataaaaacaaggtgagtactgccctggttctcacaatgtctgggatatttttggttgtcatggatgggtgcagtggggagggaggcatgtatccctactgacatgtggctcagaaatcttgaactaagagaagcatcttccaagggtggcctctctgcagttgtgacatctgagctgggatctgaacgtgccaccccgagtaaagtttgcaggcccagcgtgggggttcagtggacacacacatgtgagtccagaaagacccagtgggtctgaggaacagtgacaataggcccctgggctggggccgagggaaaggagtgacagaaggtgatgtcccagaggccatatcctgaggcctctccctcgatcccgtgatgtttcagaaggtccctctggctgacgggtggagaatgagctgttgggccaggggagaaagtagatggctcgggttgattccccgggcaagatgaaggtggctcggcagagttggagggggctggtgaaacgaggaggaattgcaggctgggcaaagtgttcctgcaaagagcgggctttgcaagccataaggtctgtgttgcaaccactgaactctgcctttgtgtccccaaagcagccttaagatgagatgtgacaaatgggcacaggcatgtgccattaactttatttatggacaccaaaatttgaatttcctagagctttcacatgtcacaaaatatttttcttttaatattctcccaaattttataaaatgtaaaaaggccagcccaggcaacatagggagaccccatctctatgaaaagaaaaagaattaggcagtcatggtggtgcacacctgtggtcccagctactcgggaggctgaggcaggagggtggcttgggcccaggaggttgaggctgtagtgaactatgattgtgccactgcactccagcctagatgacaaagagagacgccatctatttttttaaatggttaaaatggtcaattttctgttatgtgtatacatatatatatgtgtgtgtgtgtttgtgtgtgtatctgtgtatatatgtgtgtgtgtatgtgtgtgtgtatgtgtgtgtgtgtgtgtgtatgtgtgtgtgtgtatatatatacttttttttttgagtctgagtctttgtcacccaggctggagtgcagtggcgcaatctcagctcactgcaactctgcctcccggcttcaagtgatactactgcctcaacctcccgagtagctgggattacagacacctgccaccacacccagctaatttttgtatttttagtagaaacagagtttcatcgtgttgtccaggctggtcttgaactcctggcctcaaatgatccgctcgtctcagcctcccaaagtgctggaattgcaggtgtgagccactgtgccctgtctgttatgtatattttatcacagttttaaaagataaataaaacattccgagcttgaaagccgaaacacaggtggtgggctagatgggaccttggggtcatcatctgctaatcacagagcaacccaaacaggttggcacttggaccaaaagtgtgtgagacccagaccgagggccgggtggaacccagaatcacaggggatttgctaataaggcaaatctgggtgaggacgcacctgctccaggaagggaggtggggttgctctagcgacgatgagcctggggtctaggtggcagcagcaggccaagtgccaggcgccccagggatggggaaggattgattgaataaatgtttaaaggaacgaatgagtggatgcacaggtggatggggaggggttgtgctgtaaccaccatgaaacaaactccacactttgatgagccacgtggagagggagtgggcagaaagaagaaactggaagttgggccgggtgcggtggcttatgcctgtaatcccagcactttgggaggccgaggcaggtggatcacctgaggtcaggagttccagatcagcctggccaacatggtgaaaccctgtctgtactaaaaataggaaaattagttgggcatggtggcacatggtgcagggctgaggcaggaggatcgcttgaaccccagaggtcaaggctgcagtgagccgagatcgtgccattgcactgcagcctaggcaagaagagtgaaactctgtctcaaaaaaaaaaaaaaagaaagaaaagaaaaaagaaattaaaaaaaaaaagaaaatattacctagagtaaaagaaaccagacataaaaggccacatattgtacaatcctatctatgtgagatgcccacagaggcaaatccatagggccagaaaacagattggtgtttgccagggactgggggtggagaaatgggaagtgactggtaatggggacagggtatccctttaaggtgatgaaaatattctggaactaagtagaggtggcggttgcacaacactgcatgtataaaatgccactactttaaaaatggttaatttcatgtgaattgcactttaataaaaataaacaagtatttaaaaatccaccaatgcaaacacttctctgttcctctgtggtggaggaagggacacgcgcttttttttccgaccttaggaaggaacaagggagccggggtcccctcccagcctgggagccctgggcacagtcccggctcatttgtcagagctatcggagccgtcctcgggctggtgggagttcagggctctgaaaggttttctgtcaaggcttgaaagggggccaggtttttttccccccggagccgcgcagtctcggggctgttgttctcagcaatcgcagggcctcgtgttagcaggaagcacagccaagtagggtttcctgcgtgttggagagaggaagctccgtaatgttctgggaggcgatggttaaaaataactccggtatataaagacagcggagggtccccttgttcgctcactcgggcgccggccggctggacgcagggccgagcaggtggtttggggcctcgggaaggccaaacccccgcctctgggcccctggctggggaagacaccagccaagttcagagccccaagtcggcctcacttccacaactcagcgtcagggacaccgtgggcgtttctgtttcaaaacgcttttctccagcaaagaacgtaacctcaagctgctgtcagggtagaggaatccctgccccccgccgccacccagataggttgggccgtgattttggctgtgcctggcagtgacgatgtagcgcacccaggctggggggcgctggcagccagggttcaaatcccggctctgccacctaacgctgggactcagtttctccatctgtagaatggaactaacaatagctcctatgctgttgtaagcactaaacacagaagttaagctttgggagttaggagggtgtgacctgggaaatggatgtctgccctttcataagcagattttgttttgttttgttttgttttgttttgagacagggtctcactctgtcacccaggctggagtgcagtggcaagatcacggctctctgcagcctcaacctcccaggctcaagtgatcctccctcctcagcctcccaagtatctgggaccacagatgcacgccaccacgcctggctagttttcttttgaatttcagttaagacaaggtatcactatattgccctggctggtctcgaactcctgggctcaagagatccccccatctcggcctcccaaagtcctgggattacagacatgagccactgcgcctggccacaagcagatttttagagttgtcattgccatcggaacagctgcccagacagcaagaagagcaaaagcctgtgtctggggtcaatgccagggtttgaggcttccaagcctaggtgaccccacaacagattcaacacatacaaaaaggatcacaaggacatgttataaacatctcgatgccaaaatattcagtgacagggatgaaatggacacattccttgaaagacacaaattaccaaagcttacttaagaacaaatagatcggccgggcgcgatggctcgtgctgtaatcccagcactttgggaggccgaggcaggcggatcacctgaggtcaggagtttgagaccaggctggccaacatggtgaaaccccgtctttactaaacaacaaaaattagctggccatggtggcggccactgtaatcccagctactcaggaggctgcggcaggagaattgcttgaaccccggaggtggaggttgcagtgagctgagatcgtgccattgtactccagcctggacaacagagtgagactctgtctcaaaaaaacagaaaagaaagaagaagaaagagaaggggaaggggaagaagaggaggaataagaggaagaagaaagagaaggggaaggggaggaagaggaggaataagaggaagaagaaagtagaaagaagaagaggaggaggaagaaggaggaggaggaggaggaagaaggaggagaaggaggaggaggagaaatagatcacccgaatatccctgtgtctatgggataaatcaacattgttgtaaaaagaacttcctacaggccaggcattgtggtgggtgcctgtaatcccagcactttgagagcccaaggcaggaggatcacatgaggccaggagttcaagactagcctaggcaacatagcaagatcccatctctacaaaaaatataaaaattagctgggcttggtggcttgtgcctataatctcagcactttgggagactgaggtaggagactcacttaacctcgggagtttgagaccagcctgggcaacacagtgagaccccatctctacaaaaacattttaaaattagccagacatggtgggtttcaatggtggctttcacttcatagggggcttttgttccaaagtcgcaggaggtggaattccatcaaccagtcccagctacttgggaggctgaggtgggaggattacttgagcctaggaggtcaaggctgcagtgagctatgattgtgccactgcactccagcctgggcgacagagtgaaaccctgtctctaaacaaacaaaagcctttctacaaagaaaactccaggtctggatggcgtccctggtaaatttcccctaaacatctaaggaagagagagcatcactttgataggttggtgcaaacgtaattgcggtttttgccatgacttttaagcaattacgtttgcaccaaccttacacaagggctttcaccaaactgaacaggaaagaaagcttcccgactggctttataccaggggctgctccaggcatgctggggactgtcctaggtgccgatggctggcttcctgctgttcacaggggcgctggggctccctgccccccaaaacaagatcctgttcccttccagggaggcgtgttcttctgccgttagggcagagccccggtggggctcagggaaatgaaagacatatttgctctccagaaatctgagcccgcagtgccagctcccctgaagggcgcctttgtacgctgcttgttgccacaattagcgccgtcccagactgcggcctgcagatcgaggccgccttggctccgaagcccctttcaggagtcatcagcgtcctccatgggctctgacgtgggctatttttaactggccaaaggggagttgttatgggccagcagcagcgggggacttgaggggagagaggatggcgggtgttggagaggccaagggctgtggccggtggttagggtctctgcggggagcagtgtctgcagccctgggccatggggtgtggaggcagggacctcgggcctcggtttcctcatctgtccaatggtggctttcacttcatagggggcttttgttccaaagtcgcaggagctggaattccatcaaccagtcccagggtcctgccctgcctgcctctctccatcctgttctctgtccctccctctctctgtgtgtctctctgtgtgggggggtctcactctctctctctgggtctctctctctctctctgagtctctctctccctctctctctgtctctctgggtctgtgactcttttctgtctctctgtctctctatgtgtttctctctctgtctctgactttcttcttctctgtctctctgggtctgtgactcttttctgtctctctgtctctctctgtgtgtgtttctctctctgtctctgactttcttcttctctgtctctctgtgtgtctctgtatctgtctctctcatgtgagtctctccggcatgagtctctcccccttctctctctgtgtctgactctcttccctcgtctctctgtctctacccctctttctccatctcttgctctttctctctgtgtctccgtttctctctatatatctctctccctctctttccttgtctctgtctctccctctctgtctctctttatctcctctatctctgactctctctctgaccctccacgtctctcccagggtatacattgtgtttccgcagctgtgcctgggcagggcgagcaccccataccccaagaacaagaagggtggccctacggcctccattcctttcatggggaaaagactgcggactgagtggctgcccgtcccacagtcgaccctccaactccaaggcacgctgtgtgttcagagccgcccctcggtctccatgtcccagcagggagaccctgacttctggtctcattcaaagcttttagaagaaggctgtgcactctttgcaactagattttcttaattaaataaatagatgtccggacctctctgggaagggacttggagctcctgccaagctgtcctgggtgaccatgaactcccagggggttggtctcaataaagagcagcccacggccaatagcacacctgctgatgctctggggacatccctgtgctaagggaaggcactgcccctaccccaccttacggaggaacgcaggcttagagaggggcagtcttgcaaccaggccaacaggggaggctgcctgaacctggcctttttttttttttttttttggagacagagcctcactctgtcacccaggctggagtccagtggtgcaatctcggctcactgcaacctctccctcccaggttcaagcaattctgctgcctcagcctcccgaggagctgggactacaggcacatgccaccatgcccagctaatttttatatttttagtagagacgagatttcaccatgttggccaagctagtctcaaactcctgacctcaagtgatccacctgccttggcctcccaaagtgctgggattacaggtgtgagccaccatgcctgaccttttttaaattgtggtaaaatacatgtaacataaagtttatccatcgtaaggtgtgcaatatggtggcattcagcacgttcacaaggttgttcaaccaccactagtatctacttcagaacattccatcagtccaaaaagaaaccctgtcccagcggggcacggtggctcacgcctgtaatcctagcactttgagaggccgaggcgggtggatcacgaggtcaggagtttgagaccagcctgaccaacatggtgaaaccctgtctctcctaaaaatacaaaaaaattagccgggtttggtgacaggtgcctgtaatcccagctgctcaggaagctgaggcaggagaatctcttgaactcaggagacgaaggctgcagtgagccgagatcgcgccactgcattccagcctgggcaacagagggagactctgtctcaaaaaaaagaaaaaagaaaagccctgtccccgtcagcagtcactccccatttcccttcccccaccccaggcagccactaatctgcttcctgtctctacggatttgcctgttcagggcatttcatatcaatgaaatcatacaccatgtggccttttgtgtctggcttctctcactcagcatatttttggagttcatccacgttgtagcatggagcagtgcttcattccttttcacagctgcgtaatattccattgctggatggaccacgttttgtttatctgttcattcgttgacagacacccaagttgcttccaccttttggccgttgtgaacagtgctgctgtgaacatgcatgcacacatctttgtgtgaacacccaccttcaattcttttggggatattccccaagaatacaccaacgaataccaaaatccttttgagtatatgagttaccacttcagggtggagctgctatggtatatggtaatttttttattttatttatttatttttgagatggagtcttactctgttgcccaggctggagtgcagtagtgcaatcttggctcactgcaacctctgcctcccgggttcaagcaattctcctgcctcagcctcccgagtagctgggacttacaggtgcacactatcacatccagctagttttcttgtatttttaggagagatggaatttcattgtgttgtccaggctggtcttgaactctttacctcaagcgatccgactgcctcagcctcccaaagtgctgagattacaggcgcgagccaccgcacccggccatgatatgttataaggtaattctatgttgcacttttttcttttttattgagacagggtcttgctctgtcacccatgctggagcgcagtggtgcaatcatggctcactgcagcttcaacctcctgggttcaagccatcttcccgcctcagcctcccaagtagctgggacaacaggtgcatgccaccactcctggctaatttttttattctatgtttcactttttgaggaaccctcctgattttggccctggcagaattaaggctgaattatccacactccctcggacgcacctgctgtccacagctcccccaactccctgatggcggcccccaggaacaatcctcaaactgcaccagctctttcagctctcaccttccttatctgtacatcagccgtggtgacaatgtaaggagatgatgtcagaaaaggccccagctgtggcctggcagctcaaatgaaaatcattgttcccctaccccacccccaacccaggtagggttgacagattaaacacaggacgccctactcaaatgcgaacatcagataaacaatgaattcttttttttagtataagtatatcccattccatgcactattcgagatatacttctactaaaaaaaaaacttgttgtttatctgaaattccaatttaatggagtgtcctgcgttttacttgcaaaacctggtaagcagcctttgtaacagttggttctcacagacaggcagaaattgaaggggatgctaggttttctgtttgtttgtttgtttcttttgacacagagtcttgctctgtcgcccaggctggagtgcagtggtgcgatcttggctcactgcaacctccgcctcctgggttcaagcgattctcctgcctcagcctcccaagtagctggaactccaggcatgtgtcaccatgcctggctaattttttgtatttttagtagagacggggtttcaccatgttagccaggaaggtcttgatctcctgacctcgtgatccccccacctcagcctcctaaaatgctggcattacaggtgtgagccaccacgcccggctgatgctaggtatttcagaccccaagtcacccatccacccatccagcctgtcacccaggctggagtgcaatggtggtgatctggactcactgcagcctcgacctcctgggttcaagccatcctcccacctcagcctcccaggtagctggaaccacaggtgcatgctcttatgcctggctaatttttgtatttttttgtagagatgagctcttgctatgttgcccacctgctgggactcaatccaccaagtagatgtctccaattctccaccattccccaagacaagtctggtgacaaagaattggttcagaacctgggaagtctttgaaggtccacttttgtcagatgacacatgatctaaattggtccccaaccccaggccgccggaaaggctagtgagcatggggtgagcatagaatcaccgctctatgaaaacatgcctccctcagccctgcctcctgggccaccgaggtctgattcacgcttcctcgtattcaaacagagtcggtgcagctggaagcaaccctgccaggggtaagtcagccagtgcaggtaacatttctccccctcgatttttcccagaacccggctccgggcccaacacaggatgcctgggggatgtcagaggattctaagtgaggaaacccctgccgtccattgctgttctgttcccccagggacgctttgtccagggcccaccgatccatcacacatacaaggcccagggccctggaatgtttaagagcccacaaaaaaatagcctttttttttttttttgagacagagtctcactctgtcgcccaggctggagggtagtggtgcaatcttggctcactgcaacctccacctcccgggttcaggcgattctcctacctcagcctcccaagtagctgtgattacaggcacgtgccaccacacccagctaatttttatatttttagtaaagatagggtttcaccatgttggccaggctggtctcgaacatctgagctcaggtgatctgcccgccttggcctcccaaagtgctgggattacaggcataagccaccacgtccggccacactgtatgtttttgaatgttaggagggacagaggatcccatatccagcatgtaccgggagatacaacccatttctcagatgacaaaactgaggctgagaaaagagaaacaacttgaccgagctctaggctattgttctctaaaaaacttttgtggggacagtgatttttttttttaagagacagggtctcattctgttgcccaggctggagtacaatgatgcaattgtagctcactgcagcctcgaacttctgggctcacgtgatcttccgccttcagcctcctgagtagctgggattacaggtgcatgccaccatacttagccacttagctttttttttttaattttatttttattttttatttttgtagagatgggatcctgctatgttgcccaggctgaccttgaactcctggtctcaagtaatcctctcatctcagcctcccaaagtgctgggagtgcagacatgagcccccgttcccagcttgattttgtatctttttgatgctctgggctctgtggggtgtaagctatagatacttttctttgtagataaagtgcctgcaacttacatttagtttcagggggtccatgaacccctctgaagctcacacaggggaacaatcctgggtccagatcaaagcctgtgaaatcagtttaaatcgtggctcagccaaggatcaaccgtgcctcagttttcctcctccagcacatcactatagagtggtggaaatattactggctctccgagtcccaaaaactaaggaggatccatgcagggcctggcatatactgggttttcaataaacagttttcttctcccctgtcagcctgatgctccacaaactctcaaacacacacacacacacacacacacacgtgtgagcatgagcctgaaaaaacacagctggccatttcattgatagattgacttttgttattattatctttagtagagacaaattctcactatgttgcccaggctggtcttgaacccctgggctcaagcaatcctcctgcctcggcctcccaaagtgctgggattacaggtgtgagccaccgcgcctggccaagctggccattttatttatttatttatttatttgttgttattattattattattattattattattattattatttgagacagagtgttgctctgttgcccaggctggagtacagtggcgcaatcttggctcactgtaacctctgcctcccgggttcaagcaattctcctgcctcagcctcccgagtagctggggttataggcacccgccaccacgtccagctaatttttgtatttttagtagagacagaattttaccatgtttgtcaagctggtctcaaactcttgagctcaagcgatcctcctgcttcggcctcccaaagtgctgggatgatgggcatgagtcaccgcgcctagccaagctggccattttggactcaagaccttcacatttattcctgaggaaagggaaaaaaaaaaaaaaaagaaggaaaactccctctcactacacatagtttcaaaaactgccctttcagtggaaaagttttttacgtcttaagaaaaacctgattgtttaaagtcaggtctgcagtaaacgggcggctatttttaagtgcttggggacatatgtctgcaacccatggaaagaagagaagccgtttgtcttgggagcttgtccagaatgactggagtgacgtggagtgcggggttggaggtgggagtgggggggacacgagctgtcagcctgccagaagcacaaaaaaactcccaaaatattccagaacattccttctcgagtcgtcagaaatcatactatccgggccgcgcctcaaagttcccactcagcaagcagttgttttccgtttcattttccctcttcttttttttttcccctcaaatcacatttgtttttccacaatcgaaggcgctcacacacatctcgccctgaaattcagacacactgttctcacctagaattgtaaacagcaacctctccaccccctcccgtggccgggtgtttgggtgatgctggaaaaatcttctaaaggcagggagaaaaaaagggagttttccaaaaatcgacacagggcttacgttacacagagtttatgcaatcagcccctggaaacaactagacgggcctccccagctgcagaggctctgagtagcaataaagtcgtgagaagggaaagtcagcctttggcaagaatccccgactcccccatgaaagtgataagggcggtgtggaccgcagctgggaggccaactgcgtatttgaaatatgttggcaaggccaggttctcgtaaagcatcacagaggtcctgtggaatagattcctccagcctgagaccctggcgcacccttgggtcactggtggtgtgccaggattttatttacttatttgcttgctcgtgtgttaatttttttagagacaaggtcttgctgtgtcacccaggctggagtgcagtggtgcaatcataactcactgcagcttcaaccccccaggctcaagggatcctcccaccctcagcctcctaagtaggcacatgccacccggctcagctaagttttgttgtttttgtttttgttttaagtttttgtagagatggggggaggggttttgctatgttgcccaggctggtctagaacgcctggccttacgtgatcctcccacctcggccttccgaagtactgagatgacaggtgtgagccaccacaccaagcctcaacaggagggtgtagacactttctagcagcatctcctccaccctcctagggcccttgggggctctatttggttcctaatgtcttctcccattttgcagaaaacaaaacccaaagtgcagagagaggaggtggaatgtgattcagggataaaccacacagagaaagcctaaagtgaaatctgtctgctgccacgggatttcccttaaagatccctgtccctcggccgggcgcagtggttcatgcctgtaatcccagcactttgggaggccgaggcgggcggattactggaagtcaaaagttcgagaccagcctggccaacatggcgaaaccccgtctctactaaaaatacaagaattagccgggcatggtggcgagtgcctgtaatcccagctactcaggaggctgaggccgaagaatcgcttgaacccgggaggcagacgttgcaatgagccaagatcgcaccactgcactccagcctgggcaaagagggaaactctgtctcaaaaaaaaaaaaaaaaggaaaaagaaaaagaacaagaacaagcaccgactacatgcagaacatgaaggaactgagtggacgtgatgctgaacaatgaaaacgggccagccatggtggctcacacctataatcccagcattttgggaggctgaggcaggaggatctcctgggcccaggagttcaagactagcctaggcaacacagtgagacctcgtctctacaaaaaatttaaaagtagggcaggaggatcacttgagcccgggaggtcgaggctgcaatgagctgtgattgcaccaactgcactcctgcttgggcgagaggagtgagaccccaactcgaaaaaaaaaaaaaaaaaagaggagggggagggggagggggaggaggaggagcatcactgtgattccactttagggaaattaggcaaaactcctctccagcgacagagcttggagttgcgcggagagggaggctttgcaggcactagacattcctgtgtctggatccagggaactgatcctgccagcagaatccagcgtgtacactcgagatgatcgcgctgtgcggcatgcagttctgtcttcattggaaaagatcaaggctgggtgtggtggctcacgcctgtaatcccaccactttgggaggccaaggccagtggatcacttgaacccaggagttagagaccagcctggacaacatagtgaaaccccgtctctaccaaaaatacaaaaaattagccgggcgtggtggcgaatgcctgtagtccaagctacttgagggggtgaggtgggagacttctttttttttttgagacggagtcttgctctgttgcccaggctggagtgcaatggcgcaatctcggctcactgcaacctcctcctcctgggttcaagtgattctcctacctaagccttccgtgtagctgggactacaggtgcccaccaccacgcctggctaattttttgtatttttagtagagacagggtttcactgtgttggccaggatggtcttgatctcctgacctcgtgatccgcctgcctcagcctcccaaaatgctgggattacaggtgtgaaccatcgcgcctggccgagaatttcttgaacctgggaggtggaggttgcagtgagctgagatcacgccactgcactccagcgtgggcgacagagtgagactctgtcttaaatttaaaaaagaaaagatcaaacaggcatttattgagcacctgttgcatgccagaccctaaaaaggcaacgaggacagagacccccgccactctggaccaggaggccaagtggaggagacgcaaaccaagtaagatgctgctgcagaaacttccagccacggtcgatccatgcaggtggttggaatcccagaagccccatgccccagagaacccctgctgtgtctggaaagaaaaaccaatcagttctgactctggctgtgcagcagggtaagcagagggagtccacagacgagggataaggctctgtcctggtctcaaagatcaaggaggagtggatggtggtagaaagaggtcccagcgcgtgatttgattggaccagtgttcacagggccacttcccagtccaggatgagcaggtgtgaaaatgcagcctccagcctgtgcagtggctcatgcctgtaatcccaacactttgggaggctgaggctggctgatcacctgaggtcaggagttcgagaccagcctgaccaacatggagaaacgccatctctactaaaattacaaaattagccgggcgtggtggcacatgcctgtaatcccagctccttgggaggctgaagcaggagaatcgcttgaacccgggaggcagaggttgcggtgagccgagatggcaccattgcacaccagcctgggcaataagagcgaaacttcttctcaaaaaaaaagaaaaagaatagaaaatgcagcctccgtgacttgcccgaggtccccaagctgggacaaaatgggatacatctcagcagccaggtttgtccccaaagggggctgtaaaacctcgtgggaacccacagggacccgccccttgaaggtggtgatggtccccactgcctgctggcttcgctggtgactcagtacccaccaggccaaggtgtgtctgggagctgcctctctggacggccaccccaccttttgtacatggcctcttggtgcctgggacacagtgagtcacaagacaaagccgtcagattgtctggggcaaaaccctttgtggcaacagatggacaagcctggtaaatggcccgggcagctgggcagccagcgctttgtaaaacctttccaagtggtcctctttgaacctgatgaggacaaaagccaatggccaatcatctctgaaagtcctcaaaagtgcacagacatacccttctttgtgcatggggacagaagactttcaacgtgaatgcgattccttcattctgtcccggtgagcctcacttatttggggcatcaagtatcccagcctggaagacaaattgtttcaccttcaccatgaatggtgtgtgtgtgtgtgtgtgtgtgtgtgtgtgtgtgtgtgtgtgtgtgtgtgtgtgtttgagatggagtctcattctgtcacccaggctggagtgcagtggtgcgatctcagttctctgcaacctctgcctccccagttcaggcgattcttgttccttagactcccaagtagctgggactacaggtgcccaccaccacggccgactaatttttgtatttttagtagatacagggtttcactatgttggctgggctggtctcgaactcctgaccttgtgatccacccgccccagcctcccaaagtgctgggattacaggtgtgagccaccacgcccagcccattgtctctatttggaaggaatgagcagcatgttgcccctgacgaggagaaagggagagacaggcccacagcctcctcacccccacccagttccacccaccggtcacctgagcaatcctctcatcttggcccaaaaccaaccaggggcagggaatgaggctgcgttcagtgcaggcagaactctaagaggctcccaagattccaggcagtctgcgtacacacctgctataatcccgtaagtctgggtgtgactagtgagtcagtgagggtgtcacttccttgataaggtgacattttaaggcaaaggtgagaaaaccttaccaatataattaaggtccaaaataatttgattttgagttcatcaaatgggagcttaccttgggtgggcctgacctaatcaggagagtgctttgaaagaggatctaatggtaatttttttttcaaccatcaattttgctcctgagtctaatggcaaattttatgttatgtatatttaaccacaatttaatttttttttgagacggagtttcattcgtgttgcccagactagagtgcaatggcgtgtgcagtcttggctcactgcaacctccatctcccaggttcaagcaattcacctgcctcagcctcccaagtagctgggattacaggcatgcaccaccatgcccagctaattttgtatttttagtagagacggggtttctccatgttgggcaggctggtctcaaactcccgatctcaggtgatctgcccaccttggccttccaaagttctgggattacaggtgtgagccaccatgcccagtccttaaaatttttaatttaaaaaaaaaaaccgtgatggcaagtgaaaacaaccaaagcgtccaccaacagatgaatggatacacaaaatatagtgtagccatagagtggaatattattcagccaggaaaaaggaataaaattctgattcatgctacactgtggttgaagcttgaggacattatgctaagtgaaatgagcccatcacaaaaagacaactactgtctgatttcacttataggaggtctctagagtggtcacacttatagagacaggaagtagaatggtgggtacgaggggctagaggagaaggaatggggagtttgggtctaatagggacagagtttcagtttgggatgataaagaagttctggaaatagaaagtgacaatggtggccaggcacggtggctcatgcctggaatctcagcgctttgggaggctgagaggggcagatcgcttgagcccacgagttcaagaccagcctgggcagcatggtgaaaccccatctctacaagaaatttaaaaattaggcaggtggtggtacatgcttgtagtccctgctactcaagaggctgaggtgggaggatcactggagcctgggagggtcgaggctgcagtgagccaagattgcaccactgcactccagcctgggtgacagagtgagatcctgtctcaaaaaataaaaagtggcaatcgttacacaacatcatgaataaacttaatgccactgaattgtacacttaaaaagagttaagatgaggccaggtgctcacgcctgtaatcccaacactttgggaggccaagtaggggtgtggattgcttgaggccaggagtttgagaccagcctgggcaacatggcaaaaccccgtctctacaaaaaaatacaaaaattagccaggcatggtggtgcacacctgtaatcccagctactcgggaggctgagggatgagaatcacttgaacccaagaggtggaggttacagtgagccgagatcactccattgcactccagcctgggcgacagagtgagactctgactcaaaaaaaaaaaaaaatggttaagatgaattttaataaatgttatgtatgttattttaccattcagggggttgtctttgttttgttttagagacagggtctcactatgttgcctgggctggagcacagtggcactgtaccgtacaggacaccctgtgatatggttcgtagtctccagggggggagagaagaatgacattactcccaatatcgtggggagtgtccacccccctgtgatattgttcataatatccagtcccccctcaatattacacacggtatcacggggaagtgtacacaccctacacaccccctgcgatattgagggtactatcatcttgtcacttcctgggctcagtggctcacacctgtaatcccagtattttgagaggtggaggcaagggaatcacttgaagtccaggagttcaggaccaaccagggcaacatggagtgccctctgccctccccaccaaaaaataaaaataaattagctaggtgtggttgctaattattaatattatgtgtgatatcacaggggggtgtacacactccctgtaacattgggggtaccatcattctgtcccccctttgatatgacgcacaatatcacttgagggtgtacacaccccctacaatattgggaatactatcatcctgtcctcccctggatattatgaccagtatcacagaggggtgtacatgccccctgcgatattgggggtactatcatcctgtccccccctgtatattatgactggtattatggggggtgtacacgccccctgcgatattgggggtactatcatcctgtcccccccgtatgactggtattacaggggggtgtacacgccccctgcgatattggaagtactatcatcctgtccccccatctatattatgactggtattacaggggggtgtacacgccccccgcgatattggggatactatcatcctgtcccccctgtatattatgactggtattacaggggggtgtacacgccctctgcgatattgggggtaccatcatcctgtcacgccctgtatattatgactgctattacagggggtgtacacgccccctgcgatattgggggtactatcatcctgtcatgccctgtatattatgactggtattacagggggtgtacacgccccctgcgatattggggatactatcatcctgtcccaccctgtatattattacaggggcgtgtacacaccccagtgacattggaggtgtgatcatcctgtccccctttgtatattacacgtgccatcacagggggtgtacacagtggcatcacagctcactgcagcctggatctcccgcctcagccccccaagtagctgggactacaggcgtgagcaaccacacctagctaatttatttttattttttggtggggtgggcagagggcactctatgttgcccaggctggtcccaaactcctggtcttcaagtgattcccctgcctccctctcccaaaatactgggataacaggcgcgagccactgagcccagctcaccttaatttttttgttgttgtttaaaacaaaaatcaatgcatacaggctgggtactagttatttggacaactagtctcaaactcctgggctttagcctgtaatcccaaaaccccatctctacaaaaaataccaataaaattggccaggtgtggtggtgcacaaatgtattcccaactactcgggaggctgaggtgggaggatcgcttgagcctaggaggccgacgttgcattgaaccagatcacgccattgcccttcagcctgggcaacagagagagaggagactccgtcttaaaaaaaaaaaacaacaacaacaacaaaaaaaacggctgagcacggccgctcacgcctgtaatcccagcactttgcgaggctgaggcgagcggatcgcctgaggtcaggagttagaaatcagcctggccaacatagtgaaaccctgtctccactaaaaatacaaaaaaattagctggatgtggtggcaggcactcccagctactcgggaggctgaggcaggagaatcgcttgaacccaggaggcggaggttgcagtgagccgagatcgcaccactgcactccagcctgggcaacaagaatgaaactccatctcaaaaaataaaaaaataaagccaggctcagtggctcacaacacctctaagcccagcactttgggaggccgaggcgggtggatcacctgaagtcaggagttcgagaccaacctggccaacatggtgaaactccatctctactaaaaatataaaaattagccaggcatggtggcctatgctgtaatcccagctactcaggaggctgagacaagagaatcccttgaacccgggaggcagaggttgcagtaagccgagatggtgccactatactccagcctgggcgacagaccaagaagactctgcctcaaaaaaaaaaaaaaaaaaaaaaacaacaacaatgggaagcctctgaaactccccttccccaggggtctccgggggtctccacactcctcggctgagtcagccttcctcctgcaaacagcccagggttcaccaagtgtacaaggctgtcgtgggccccatgccccttctcgccacaggcttgtgcaggcacggggccgtccccgcttgattgctaggggtttagccaatattttcttacggggcgcccttgctgggacacaggtgcaagtgtgacatcgtgggctgtgagtcaggccttggcactccttgcacggccggccggcatgagtcaggctgcatttgcccactgttcctgtcttttctcttgttctgaacaccgcatgtgccaggccttctgtgggtcatcagtcattattttgggtatgcagcgcagatcactcagggacagacttctctgggtcaggggagctgggactttacttatcaaattgcaaatgtccaacataccccatgcagaaccagtgacacggagagaggtttccatcccagggctggggtcggggagggtgtcgaacacccagtacagcccccagggtttcctagaaatgcaaatcacagctctgaagtgcagcctggcctcttatggttagacacaggttcacacctgagaaagcttggcaacgtctagagacatttttggtcctcacgactcggggaggcgcgtcgggggaatgctattaattgtgggttttgccattaaaaaaaaagtaatggcaagggccaggcgcggtagctcacgcctgtaacccagcactttgggaggccgaggcgggtggatcacctgaggtcaggagttctagaccagcctggccagtatggtgaaaccctgtccctactaaaaatacaaaaatcatggccgggcgcggtggctcacgcctgtaatcccagcactttgggaagctgaggcaggtcgatcacgaggtcaggagatcgagaccatcctggcgaacactgtgaaaccccgtctctactaaaaatacaaaaaaaattagccaggtgtggtggcgggcgcctatagtcccagctactccggaggctgaggcaggagaatggcatgaacccagggggcggagcttgcagtgagcggagatcacgccactgcactccagcctgggcaacagagcgagacaccatctcaaaaaaaaaaaaaaaaagtacgaaaatcagccaagcatgatgccgcgcacctgtcatcccagccactggggaggctgaggcaggagaatcgcttgaacccaggaggcggaggttgcagtgagccgagactgcagcactgcactccagcctgggcgacggcataagattccatctcaaaaaataataataataataatggcaagaacggcaatgacttttgcaccaacctaatagtatctggtgggtgcaggccagggatgctacaatgcacgggatggcctctgccacacagataatccggcctcaagtgctgaagttgggaaatcctgcttaccagcccctgaagagtccatttctcatctcatgccggcttaccccctaccaccttttttttttttttttttgagacagtctggctctgtcccccaggctggagtgcagtggcacagtcttggctcactgcaacctccgcctccctggttcaagtgattctcctgcctcagcctcctgagtagctgggattacaggcgcgcaccaccacgcccagctaatttttgtatttttagtagagacggggtttcgccatgttggccaggctggtctcgaactcctgacctcaggtgatctgcctgcctagagctcccaaagtgctggtattacaggtgtgagccaccgcgcctggcctaaataattttaaaataggtcagttgacagtcttcaggcggcaagttagagaaacacatgcaggcagatgcatgcttgtttgaggctgtaaagtgtccacattgggaaactggggagaagataggagaactatgtaggggctctaggttctgcagctggcaatattcttctatgtccacttcctcccattaaaattcggcctccagccaagtggccagtgtctgggatatgttattgtgtctggctctgaggaactggaactccttccagttcttgaagatacttggggagggaagatgcttggggagcatttgtttggctccccagccataatgcacagtattggcatgactgggggtatggatggggacactgggcatccccgatatgatgtgatgaggagggcatgctcccgtcttcttccccaaaccccacaattcctgtctaaccacaagaaaatgtcaaacacagattggggtacacttggatgccctggggggggaccggccagcactctttaagactgccaaagtcagccaggcacggtggctcatgcctataatcccagaattttgggaggctaaggcaggttgatcacctgagggcaggagttcaagaccagcctgaccaacagatgaatccccctccctactaaaacacacaaaaaagtaggtgggtatggtgggtgggcgcctgtaatcccagctactcgggaggctgaggcatgagaatcacttgagcccaagaggcagaggcagaggttgcagtgagctgagatggtgccactgcattccagcctgggcaagaagagcgaaactccatctcagaaaaaaaaaaaaaaaaagactgacaaagtctctcacacctgtaatcccagcacttcaggaggccaaggcaggaggatcacttgagtccaggaattcaagaccagcctggacaacatagcaagaccccatctgcacaaaaagtttaaaaaaatacccaagcatatggcacacacctatggtccctgctactcaggaggctgaggtggaaaaatcacttgagcccaggagcttgaggctgcagtgagctgcgatcaagttactgcacttcagcctgagcaacagagtgagagcctgtctaaaaaaaaaaaaaaaaaaaaaaaaaaaaaaaaacgggccaagcacaatggctcaggtctgtaatcccagtacttttcaaggctgaggcgggcagatcactggaggtcaggaatttgagaccagcctggccaacacggtgaaaccccatctctactaaaaatacaaaaattagccgagtgtggttgtggatgcctgtaatcccagctactcgggaggctgaggtgggagaatcggttgaacccaggaggcggaggttgcagtgagctgagattgcgccactgcactgcagcctgggcaacaagagtgaaactccgtctaaaaaaaaaaaaaaagaaaaaaaaaaacaacaagagattgaacactgctgaggtcatgaaaaacaaggaaagactaagaaaccatcacagaccagaggagatcagggaggaacgggggctaaataaggtgaaggatcctggaagagagggaggacatttgtgggaacattggtgacatccacatagaatgtctggagtttagttgatagcatcattgtcccagcattaatttcttagtttcaccaaatgtactgaggtagggaaagatgtcaacatcagaggaagctggtggaaggggacatgggagtgctgcatagcctctttgcaactttcctgccattaaactgattccaaaataaaacacttataagacgtttattttacaactcatgccaggtgcagtggctcacacctgtaatcccaatgctttgggaggccaaggcaagaggactccttgagttcaggagtttgagtccagcctgggccacacagcaaaatcacatctctacaaaaattacaaaaattagccgggagtgatggcatgtacccgtagtcccagctacttgaggggtcgcgatgggaggatcgtttgagcccggaaggtcaaggttacagcctgggcaacagagtgagaccctgtctcaaaaaaaaaaaataaaaaaaagtaagctaagaagggagacataagcagcaatattggaacttacccatacttaaataaaaaaatccttccctatctgaaatgtatttatttatgattattttttagacagggcctcactctgttgcctaggctggagtgcagtggtgtgaccatggctcattgcagccttgacctcctgggctcaagcaatccggctgagtagctgggaccacaggcacgagccaccatgcccggataattttttttttctttttttgagatggagttttgcttttgttgcccaggctgcagtgcaatggcacgatcttggctcaccgcaacctccacctcccgggttcaaacgattgtcctgcctcagtctccctagtagctgggattacaggcagatgccacgacgcccagctaatttttatatttttagtagagatagggtttcaccatgttggtcaggctggtttcgaactcctgacctcaggcaatccacctgcctcggcctcccaaagtgctgggattacagtcatgagccaccatgcccggcctcccggataatttttaaaaaattttttgtggctaggcgcagggctcacgcctgtagttttaacactttaggaggccgaggtagatggatcacctgaggtcaggagttcgagaacagcccggccagcatggtgaaaccccgccccgcctctactaaaaatacaaaaattagcaaggcgtggtggtgggcgcctatactcccagctactcgggaggctgaggcagcagaatcgcttgaacccgggaggtggaggttgcagtgagtcgagattgcaccacttcactccaacctcggcgacagagactgtatcaaaaaaaaaaaaattttgttgagataaggtcttgctgtgcttcccagaccggtctcaaactcctgggctcaagcgatccactcgccttggcctcccagagtgctgggattccaggcacgagccactgcacctggcctctatctgaaatttacatttaagtggggggtcctgtgtttcagcccaaaactctagtctaggcggtagaaaggacccagtgggctgggggtggggcccagagtcagcacccggctctggatctggcacctgggtggcaggggttccattaactgaggtgggaaacagaggccggagtggaggggggataatgagctcattttacagcagctgctaatggctcttaataatgatggtgatgacgataattgcacctcccccacagcataaatcttgctccacccgggctggttttggactcctctggctccttacccggcctgggaacctgaggggcatcgagccagactcacgcccgcgtcccccgccacgcctagccctggtgtggaactgcacagatgcccccactgtcccctcccgccgtcccgagttccctggggttgctattaagaaacctgtgacctggaagctccctcctggcttcaagtcttcctgcctttgcttcgagtcgtcctgcctttcaacactgaaccaatgtagttcttacatatattgactgatgtctcctgtctccctaaatgtccaagactaagctgtgccccgaccaccttggacacatgtcatcaggacctcctgagtctgtgtcatggacgggcatccccaaccttggcaaaataaactttttcttttttttttttttgagacagagtctctgtctgtcacccaggctagagtgcagtggcacgatctcggctcactgcaacctctggctcctgggttcaagtgattcttctgcctcagcttcccgagtagctgggatgacaggcacccagctaatttttgtatttttagtagaaacggggtttcaccatgttggtcaggctggtctcgaactcctgacctcaggtgatccgcccgcctcggcctctccaagtgctgggattacaggcatgagccaccatgcccggccgcaaaataaacttgctaaattaactaagaactgtctcaaattttcggggttcacagtggcttccaacaacggaaacgtgttctctcacagtcctggaggtcccaagtcgaaggctgacaggtgagtttcttctggggaccttgaaggaggggagggacagggggctaaggtgactcccaaggtggcaggtggatcgtagtcccagctactcaggaggctgagacaggagaatcacttgaacctggcaggcggaggttgaaatgagccgaggtcacgccactgcactccagcctgggcaacagagcaagactccatcaaaaaaaaaaaaaagtgtcagaggaatgcaaacaaatccttacacacacacacacacacacacacacacacactcacaatagccccaaggtggaagcaaatcaagtgtccatcaacaggcaaatggaccgaaacaatgtggtccatccacaatatggaatattattcagccatgaaaaggaagcactgacccatgcttcagcatggatgaaccccgaaaacacgatgctgagagaagccagacacaaaggccacatagcgtgagattccatctgagtgaaatgcccagaataggcaactccatacagccaggaagcagatgggtggttgccagggactggggaaggggaatggggagtgactgctgatggggacagggtctccttttgtggggatgaagatgtcctgggactagtcagaggtagtggctgcacaacactgggaatgcgctaaatgccaccaaattgtacatttaaaaatggctacctttggccgggcctggtggctcacctctgtaatcccagcactttgggaggcaaaggtgggaggatcacttgagcccaggagtttgagaccagcctgggcaacatggtgagacccatctctacaaaacatttaaaaattagccaggcatagtggcacgcgcctgtagtcccaactacttagaaggttgaggtgggacgattgcttgagcctgggaggtcgaggcgagctatgatcacaccactgcattccagtctgggcaagaggcgagaccccccatctctaaaaatataaaataaaattggccgggcaaagtggctcatgcctataattgccaacactttgggaggctgaggcgggtgaatcacctgaggtcaggagtttgaaaccagcctggccaacatggtgaaaccccgtctctactaaaaatccaaaagttagccaggcgtggtggcaggcgcctgtaattccagctactcaggaggctgaggcaggagaatcacttgaacccgggagatggaggttgcagtgagccaagatcatgccactgcactcgggcctgggtgacagagtgagattccgcctcaaaaaataaaataaaatttaaaaatggctaactttatgttatgtgaattccacctcaattttttaaaaaatgaaaatgcgaaacaaatggaaagagaagatatttacactccattttccaaggaaattgttacaggcacccagaaacacccagtcacctaaaagatgtggaattttacaaatacacttcaagcatgttaaatggagtccttcggtgacttaccccttccgtgtaagatttacctcttacatgaagagtttctcttcatgatagctgtcattattaataatatataatgacataattgcttaacaacatcattatgattttccaccccaattatgaggctgaagggcatcaggctgaagcactgaaattacaaggcaagtcagaagtctgctcccacaaaaagagctccccaggatcccaaaatgtggggctcaaactcaaccactgtccccctggccctgggcctccccactctccccatcaaaatggacccattcctgctccaggcaccaattctgctgaacacagaagacacaggaagccatctgcttcctggctgtatggagttgcctgttctgggcatttcacacagatggaatctcacactacgtggcctttgtgtctggcttctctcaacatcatgtttttggggttcatccatgctgtagcatgggtcagtgcttccttccttttcatggctgaataatattctatactgtgcatggaccacattgtgttgatccgtttgcctgtggatggacacttgatttgcttccactttggggctattgtgagtgtgtgcgtgtgtgtgtgtgtgtataaggatttgtttgcattcctctgacacttttttttttttttgatggagtctcgctctgttgcccaggctggagtgcagtggcgtgacctcggctcatttcaacctccgcctcccaggttcaagtgattcgcctgtctcagcctcctgagtagctgggactacaggcgcccaccactacacctggctaatttttgtatttttagtagagatgggctttcaccatattggccaggctggtcttgaactcctgacctcaggtgatccacctgcctcagcctcccaaagtgctgggattacaggcatgacccactgtgaccggccattttttttttttttaaatagggtctcactctgtcacccaggctggagtgcaatggcgttatgagaagggaagtgtgccagccacctctggtgggcagagcatgtcagggagtccaaaagggctgatcaaagagatggctttgccagacacaatggctcatgcctgcagtcccagcactttgggagcctggggtgagataacttgcttgaggccaggagatcaaggctgcagtaagttgtgatcatgccactgtactccaggatgctgtctctacataaataaataataaattatactgtcctccagcctgggtgacaagagcaagacgctgtctataaatacataaataaataaattacacgtggtggctcatgcctgtaatcccagcacttcgggaggccgaggcaggcaaatcatctgaggtcaggagttcgagaccaacctggccaaacccagtctctactaaaaatacaaaaaaaatcagacgggcgtggtggcaggcacctgtaatcccagctactcaggaggctgaggcaggagaatcgcttgaacccgggaggcggaggttgcagtgagccaaggtcgtgccattgcactccagcctggcggcagagagagactctgcctcaaaaaaaaaaaaaaactaataaattttatgatgtgtaaatgatatctcaataaatctgtaagaactaaatgaaacaaaagagaaaaaggagtccctagcccagatatatggcaaagaaagaaagaaaaaaaaaggccgggtgaggtggctcttgcctgtaatctcagcacttttgggaggtggaggcgggtagatcacttgagcccaggagttccagaccagcctgggcaacatggagaaaccctgtctctactaataagacaaaaaaaaaaaaatagccaggcgtggtggctgccacctgtagtcccagctactcgggaggctgaagtgggaggatggcttgagcctggaaaatcaaggctgcagtgagctgagatcgcaccactacactccagccagggcaacagagcaagaccttgtctcaaaagaaaagaaaaaagaaatcactctgaagttagcactcgtaaatcagacatttacaaccacgtacttaaaatgtcccagatgctagtgatgttcataccgctgacattaacagtccagattcgccactctcctggacgtgacccctcggccttcaagtttctgcttaaaaggttgattgttcgtttgtttgtttgtttgagacagaatctcactctgtcaccaggctggagtgcagtggcgtgatctcggctcactgcaacctctacctctcaggttcaagcgattctcctgcctcagactcctgagtagctgggactacaggcgcatgccaccacgcccagctgatttttgtatttttagtagagacagggtttcaccatgttggccaggatggtgtcgatctcctgacctcatgatttgcccgcctcagcctcccaaagtgctgggattacagccgtaagccactgcacccagccttaaaaggtttcttccgggccgggcgcagtggctcatgcctgtaatccgagcactttgggaggccaagacgggcagatcacgaggtcaggagatcgagaccatcctggctaacacggtgaaaccccctctctactaaaaatacaaaaaattagccgggcgtggtggcgggcgcctgtagtcccagctactcgggaggctgaagcaggagaatggtgtgaacccgggaggcggagcttgcagtgagccgagattgtgccaccgcactccagcctgggcgacagagcgagactctgtctcaaaaaaaaaaaaaaaagtttttttctgcctgcctcccctccaatccaagccagagccctgttatcctgccctgagcactccccacttttccctcagccttcccatccgcctgtgactctgtgttgcttggatagagcttcagttaaccctcaggctcctccctgtctggaagctccatgagggcaaagactggcccattctggtagacagctcacactccagcacctgcccaataagaagtattccttagccaggcatggtggctcacacccagcactttgggaggccaaggcaggaggatcatttgagaccaggagttggagaccagcctgggcagcatagggagaccctgtctctacaaacaaaataaaaaattagcagggtttggtggcatgcacctgtagtcccagctactcaggaggctgaagcaggaggatcacttaagcccgggagtttgaggctgcagtgagttatgactgcaccactgcactctagcctgggcaatagaacaagatcctgtctcaacaacaacaacaaaagagtgttcatcagtgtctattaaacgcatactgaggccaggcacggtgtttcacacctgtaatcccagtactttgggagcctgaggtgggcagatcacctgaggtcaggagttcgagaccagcctggtcaacatggtgaaaccttgtctctactaaaaatacaaaaattagccaggcatggtggcacactcctgtagtcccagctactcgggaggctaaggcacaagaattgcttgaaccgggaggtggaggttgccgtgagccaagattgcgccactgcactccagcctgggcaacagagaaagactccatctcaaaaaaaaaaaaaaaaaaaaaaaaaaagcatactgagaggcagcgatagtctgggaattcagtccagactctggagttgaacatagctctgctggcttctccctgtgcttgaagctaacgtctctaagctttggccagagtcaagattttctgccttgtgggccacgtggtccctttcaaaatgactcaactctgtcgtcatcccaggaaagtagccattgccaggcgcagtggctcatgcctgtaatcccgacactttagaaggccaaggcaggataggatctcttcaggcaaggagttcgaaaccagtatggacaacacagaccctgtctctacaaaaaatcagccgagcgtggtagcccacgcctgtagttccaagctacttgggaggctgaggtgggaggatcaactgagctcaggaggtcaaggctgcagtgagctgtgatcgtgccactgcactccagcctggaagacagagccagaccctgtctcaaaaagaaaaaaagtagctatagatgatggatctatgaatgggtatcactgacagtaagatgtatttatgcacactgaaatttgattttcatataatgtttgtgtttcacgaagtactattcttttttttccaaccattcataaatgtaaatccatgcttagctcatgggccaaatgaaagctgcagtgcccacatattatatgattccattcatataaaaatgttggctggtgcagtggctcacgcttgtaatcccaccactctgggaggccgaggcgggcagatcacctgaggtcaggagttggagaccagcctgaccaacacagtgaaaccctgtctctacaaaaaatacaaaagttagccaacatggagaaaccctgtctctagtaaaaatacaaaattagccgggtgtggtggcaggtgcctgtaatcccagctactcaggaggttgagacaagagaatcgcttgaacccggaggcagaggttgcagtaagccgagatcgcgccattgcactccagcctgggcaacagagccagactccgtctcaaggaaaaaaaaaaaaaaaaaagcctagaacaggcaaatccatagagacaggaagcagattggtggttgccaggggctgggggaggggagtggggagtgactgctgatggggacagggttttctttggcggcgacagaaatgttctgcagccagacagaggtgacattcgcagagcactgaatgtagcaaatgccactgaattgtgcactttaaaatagtgaatttcagctgggcgcagtggctcacgcctgtaatcccagcactttgggaggccgaggctggtggatcacctgaggttgagagttcgagaccaccctgactaacacggtgaaaccccatctctacaaaaaatacaaaagttagccaggtggagtggcgcacgtctgtaatcccagctacttgggaggctgagacagaagaatcacttgaacctgggagatggaggctgcagtgagccgaggtcgcgccactgtactccagcctgggagacagagtgactgtctcaaaaataaataaataaatgaaataaaataaaatggttaatttcaggttatgtgagcttcacctcgataagaacatatatacatatggatataatttacataggaatatgcatagaatgtaaagaattacactattgatattttgatttttttttaagctgcaagccaccatttgccagcctccaattaagataaataaaaatagctcccagagatggaagggttcttctaggaaaaatctttttttttttttttttttttttttgagagagagagagtttcgctcttgttgcccaggctggagtgcaatggcgccatctcggctcactgcaacctccgcctccagggttcaagcgattctcctgtctgctaccttcataaacacatgatgggcaggcattctcatgcccctttgacgaatgagggactgaagttcaaaaagaaaacatcaggccagcgcagtggcccacgcctgtgatcccaacactttgggaggctgaggcaggcggatcatcactgggatcaggagtttgagaccagcctacccaatatggtgaaaccccgtctctattgaaaatataaaaattagctgggcgtggtggcacatgtctgtaatcccagctattcaggagactgaggcgggaaaattgcttgaacctgggaggcagagggttgcagtgagctgagattgcgccactgcactccagcctgggcaacagggcgagactccatctcaaaaaaaaaaaaaaaaagaatatcattcactcaaggtcaacaagtacaagtgccagaatctaaactcagggctccagctgtccatcgcttacctcactgaacagaccaactgggaggattaaatgagaaaatacatccagacaagcctggccaacatggtgagactcccgtctctacttaaaatacaaaaattagccaggtgtagtggcgtgtgcctgtaatcccagctacttgggaggctgaggcaggagaatcacttgaacctgggtggtggaggttgcagtgagccgagatcgtgccacttcactccagcctgggtgacagagtgagacctggtctcaaaaaaaaaaaaaaagaaaatacatccagatcctcagcatagggcctggtatacattaggtgctcagtaagtattgctctctccccctcttctgtcctgtgtgtcaataagagcgaggcagtaatggcctggctggcaagaagatgatgagaggttctgatgggaacccatcagtcatcagcccagtgcaatcccgcatcttccccaagcactcgcgacctatttatgtagtagtaagaaaactccagaggcagggccaggcgtggcggctcaggtctgtaatcccagtgctttgataggcaagggcagaaggatcgcttgagcccaggggtttgaggctgcagtgacctatgatcacaccactatactccagcctgggagacagagcgagaccctgtcaaaacacacacacacacacacacacacacacacaaactccagagacaaccaggcaaatcacaaagtgacctttcctatcagacctcagctccaagcattgcagcgacaaggtggtgacccgagataagaagcgcacttgcagagggtgcctctgcccgtatctctccgcatcctcaagaaacacagaactatcaaacatttttgcaacatgaggagccaagttttgcaacatactgaaaaagggttgtgcaaacttcagcagaaacaccccaattgccccagctgggagtcatcatccagttgctgctgtaatgtgattgtaattcctccagtgttcataatttgtcttggaagctcagctgtattttacatgacgtgttttctgtagaattcctgagtacttgctcttgggatctgagccaagtgcacacaatagctatttggggcaaaacagctggtaaagagaaaggcagcttagaccctgaagaaaagtggaaagaattcaaggttactagaaatgtccagggcccagtaaaagaagattgtaatctctctatgtgcagaaacaggccatatacttcatcagtttcctctccatgctcagctcagcatggagcggaagctcagtatttatttgtggctcagacgaaaaacttcttgtttgcaagtttcctgagcccttgaagacagcctggcaggagacaacaaatgcaaagctgcacacgtaccacttatccaatcccctgttagtgacagacatcaccagtcaatcagtcaatcacagacatgaccaatccatcacagcactgggcctggctacaacctcagaatctgcaccagcacagtgctaaaagcaactattatcaacagatttgaggaaaatattctgcctccttggtctacatttataatgttgagttgttaggagaagataaggggcagcaagaaagagatgacaataagataatcaccatcgaggctgggcactgtggctcatgcctgtaatcccagcactttgggaggcttaggcaggaagatcacttgagcccaggggttcgagaccagcctgggcaacaaagtgagaccctgtctctacaaagattaaaaattagccagccaggccaggcacggtggctcacgcctgtaatcccagcactttgggaggccaaggcgggcagatcacctgaggttgggggctcaagaccagcctgaccaacatggagaaacccagtctgtactaaaaatacaaaattagccgggcatagtggcgcatgcctgtaatcccagctactcgggaggctgaggcaggagaactgcttgaacccaggaggcagaggttgtggtgagcagaggtcgcaccattgcactccagcctgggcaacaagagcaaaactccatctcaaaaattaattaattaattaattaaataaaaattagccagtcgaggtagtgcacacctgtaatcccagctactcaggaggctgaggcgggagtattgcttgagcctggaagttgaaggctgcagtgaactatgatcgcatctctgcattccagcctgggtgaccctgtctccaaaaaacaaatcatcatcaggaaacataaagttcccaacagtggccaggtgtggtggctcacgcctgtaatcccaacactttgggaggcctaggtgagtggatcacctgaggtcaggagttttagaccgagtctccctctgtcacccaggctggagtgcagtggcatgatcttggctccctgcaaccctgcctcccagattcaagtgattctcctgcctcagcctcccaagtagctgggactacagatgtgtgccaccatgcctggctaattttgctttgtttttgagatgaagtctcgctctgctgcccaggacggagtacaatcagctcactgcaacctccaccttccaggttcaagggattctcctgcctcagcctcccaagttcccaagtagttgggattacaggcacctgccaccatccctggctaatttttctatttttagcagagatggagtttcactatgttggtcaggctggtcttgaacctcaggtgatccacccacctcagcctcccaaagtgctgggattacaggcatgagccaccacacccagctaatttttgtatttttagtagagacgaggtttcaccgtgttggccaggctggtttcaaactcctgacctcaaatgatccacccgcctcggcctcccaaagtgctgggattacaggcgtgagccaccgcacccagccaaggcttgcagagctctgagggtaaagtcacctaactagttccaggcagggctgagaatgtgacttcatgcccggtgctctttctccaacatcatcattggctgggacttcacgaggacagatacctgtgcaggcagatgccaaccagatagcaggttcataggacaacagcaggagcgggtctgtgctccaggccccctcccagtgccaagcctctcctgcacagagagattccacagtgcctgagatcccctaaaaggctcattcactcatcttcacaatcagccagcaagtactgttgaacactgacaaatgccatctcatattctcaaaaggaaactgaggctccgagaggttaagtggcttgcctaaggtcacacagctaatgtggcaattaaaattcttctaggtcgggcacggtggctcatgcctgtaataccagcactttgggaagccaaggcaggaggatcacttgaggccagccaggagttaaagaccaatctgggcaacacactgaaacctcatttctcttttttttttttttttttttttgagacagagtctcgctctatcgtccaggctggagcacagtggtgcgatctcggctcactgcaacctccacctcccgggttcaagcaattctctgcctcagcctcctgagtagctgggactataggcgctcaccacaacgcctggctaatttttgtatttttagtagagacaaggtttcaccatgttggccaggctggtcttgaactcctgacctcgagatccacccgcctcagcctcccaaagtgctgggattacaggcgtgagccaacattcccgcttttttcttttcttttttttttttgagacaggttctcactctgtcgcctgggctggagaacagtggcacgaactcagctcactgcagcctctgcctcccgggttcaagcgattctcatgcctcagcctcccgagtagctgggattacaggcacgtgccaccacgaccagctgatttttgtagtttttgtagagacggggtttcaccacggtctcttttcacgctggtcttgaactcccgacctcaggtgatctgcccacctcagcctcccaaagtgctgacattacaggtgtgagccactacacctggcccacaagaccagcccacgagacctcatttctgtaaaataaaatgaaaagttcgtgttctttccatgcactggcagctctctgcattggttctgctggccaggcactctgctgaaatgtttcacgctgccctgggaggtcctcagtgggtggccactgtctttacatcacttttgtttcaacaaatcgggtccacagctgggcccagggggacacagagatgagtcaagggaggcccctgtcttgaggggttcaccgtctggggaggaagccaggcgggagaacagctggttaccacgatgtatgagtttcctgtggtggccgcaacaaaagacatagactgggtggcttccaacaatggaaatgtattccccacagttttggaggccaaaagcccaaaatcaaggcatcagcagggttggttccctctggaggctccgagggagaatcttttttttttttttttttagatggagtctcactctgttgcccaggctggagtgcagtgagtgcaatctcggctcactgcagcctctgccttccaggctcaagcgatcctcccacctcaacctcccgagtaactgggaccacaggtatgcgccaccatgcccagccaatttttgtattttttgtagcgagggggtctcactttgttacccaggctggtctcaaactcctgggctccagtaatactcctgcctcggcctcccaaaatgttggaattacagacgtgagccaccacacccagccatctgagaaagaatctgttcccttggctaggtgcagtggctcaagcctgtaatcccagcactttgggaggctgaggcaggcagatcacttgaggtcagaagctcaaaaccagcctggccaacaggatgaagccccatctctactaaaaatacaaaaattaaccgggcatggtggcatgcacctgtaatcccagctacttgggaggctgaggcacaagaattgtttgaacccaaggggtggaggctgcagtgagccaagatcacgccactgcactccagcctgggctacagagggagactctatctaaaaaaaaaaaaaaagaaacaaaaagaatcttttcccagttttgctgctggtggctccggagatatccctgggcctgtggctgcctcactccaatctctggccatcttcacatgcccttcttctctgtgtttgtgttcctgcgtcctttctctcctaaggactcttgtcgctggatcagggcacaccttaatccaggatggtctcacctcaagacgcttcatgatgtctgcagagaaactctttttgtttttgagacagtctcactctgtcgcccaggctggagtgcaagggtgcgatctcggctcactgcaacctccacctctcggattcaagtgattctcctgcctcagcctcccaagtagctgggactacaggcgcaagccaccgtgcctggctaattttatatttttagtagagacggggtttccatgttagccaggctggtcttgaacacctgacctcaggtgatccacctgcctcggcctcccaaagtgcttggattacaggcgtgagccactgtgcccagccaaagaaactctttctaaataaggtcatagtcacaggtgccagggattgagactcagacatttctttgtggggccactatttaacccattactcatggattgaattactcatggcaagaccctgtctctacaaacaaaaatcagccaggcataatggtgcacatctgtagtcccagctgcttgggaggctgagctgggaggatggcttgagcctaggagtttgaggctacagtgagccatgaccgcgtcactgcactccagcctggatgacagagcaagaccctgtgtcaagataaataaataaataaactatggattattattattattagttaataacaatatattcctctctgctcagtaattgtcacaaatgcaccacactaatgcaagatgataataggagaaaggttggggtggtgcgaggggtgctacctgggaacgccgtgtacttcgtgctcaatttttctgtaaacctaaaactgctgtagaaaataaaagtccagaccaggcgctgtgagtcacgcctcccaaatcccagcactttgggaggccaaggcgggcggatcacttgaggtcaggagtttgagaccagcctggccaacatggtgaaactctgtctctactaaaacaaaacaaacaaacaaacaaaaattagctgggcatggtggcgggtgcctgtaatcccagctacctaggaggctgaggcaggagaatccctggaacccgggaggcggaagctgcagtgagccaagattgagccactgcattccagcctgggcaacagagcaagactctgtctcaaaaataaacaaataaataaagtacgttagttaagggaggttgaaaaaaaagagagagagagagacaggcagagacgacggagcttcacaattggaaatggaaagaaaggaacgctggtcgggggcgcagtgagcgcagaggggaatgtgcttggtgtgtttcaggacccaaacagagacagtgagagaggaggaaggcagagaggtacctcagacaagctgcaggtgccagtgagcaaggctcagaggcccaggggaccaaggtgctctctgacaaactagagggatgctgtggtcagaggtctttttttttttttttttcttttaattagacagagtcttactctgtcaccctgtcacccaggctggagtgcagtggcacggtctcggctcactgcaacctccacctcccaagttcaagcgattctagcctcttcagtagctgggattataggcacacgccaccacgcccggctaatttttgtatttttagtagagacagggtttcaccgtgttgaccaggctagtctccaacttctaaccgcaagtgatctgcccgcctcagccttccaaagtgctgggattacaggtgtgagccactgcgcccagccgacggtcttggccaaagcaaaggaacaaacaaacaaaaacccttcccggcagctgcccaggcatcccatatccttgaggagaaattcctgattcccttaatctttccatcattatcatacggggaaactgaggcccagagaaaggcaattcaattcccaaagcacacaagcaggcccatctcccaagcgctggtagagaattcagtgtcacacaagatgtcacctacttccacaacaaagaaaagagcctgtgtgaactcacaatagccatttggggtaaggtactattcttatctgcatttcgaagattgaggaggcaagcccaaacagccaaagccactggttcaaggtcacacagcgcgtgctcagtggctgaggctgactcgcagccatttcagtggcaactgcagaaagcaagtttgtattcaacttgaagtctccggtgactgggtttggtgggggctgcagaggggaccctgcagagtgcatttctgcagaggctgagagtccaagcttccagggcaggagctgcctgcatccctcaccacctggctccaagttcctccttgggatgctcttcctcccatacccacatggtccccaatgactttttcacattagctcacatttcaccccctgggtgagattcagaatttccccattttctccttcccactccctcatctcacactcactttctagtcccttctactgctccatttttctttttaaacccctatcagtaaggccaggcgcaatggctcacacctgtaatcccagcactttgggaggccgaggcgggtggatcgcctgagcccaggacttcaagaccagcctgggcaacatagtgagaccccgtctctacaaaaaaatacaaaaaaaaaaatttagccaggcatggtggtgtgcaccttgtaatcccagctacttgggaggctaaggcaggaggatctcttgagcgcaggagttcgaggctgcagtgagctgtgattgcactactacactccagactgggcaacagagggagaccctgtctcaaaaaaactcaaatgaataaacctctatccttccctccttcactaaagtggaggtcccctagggcagggatcttgtctatctcttggttactgtgtccccagtgcctacccagggctggcagacagttgtaacaggagtgacagtccctggccagcagggatatggtgtgggggacagaggtggagcattgaagggacccattgggcagcattgtcctctgatgcccccgatgctggagctgtattgggggaatgactgtcatcaccgtcctctgagttacttaattcatttatggaagtcagtaaaggaacccagcctgcctgtgcctgccgcaactccaacttctcccagccacctctgcctcagtttccctgcacttgacgggcttattgaggttggggaggagggggtgggtgtctcaaatgtcaaagatttaatgtgtcttgatgttaccacacaaaagttttgttttgtttgtttttttgagacagtctcctctgtcacccaggctggagtgtagtggtgtgattgtatctcactgcagcctcgacctcctgggctcaagcgatcctcccacctcagcctcccactacacccagctaattttttttattttttaagagatgggggccactgtgttgcccaggctggtcttgaactcctggcctcgagtgatcctcctgtctcagcctcccaaagcggtgggattacagatgtgacccactgcaccaggtctacacaaggtgtttttttttacagggtgatgtgcacacggtgggtccctctgggtggtcccacaacagatgaggggcccagcctcacccatccatgaatcctggagactccagacttcccatccatccagggttctgcagccctctctgaggctggagccaatctccccttccgtcaagggatccggggagaccgccaagcccggtgctcccctgagagtctctgagaggccccgacaccgcccccgctccaggtccccgggatgctcgcgcaggcgggagcccggggcgcccgggggatccctgagcgtcacgccgctgttgtggagcgcgtgttgacaacgtcgccggggagacgggcgggggcggggcccgggagagggggaggcgcggccctggcggcgcgcgaggggccgggctgtcagcgcaaggcccaggccgccgcagtggccacggccgctgccgcccgccggcttatataccgcggctaaatttaggctgcgcccggagctcgtccccatccgggacgcgtttccgccgccgccgctttggcccggcccccgcgcgcgccgcgcctataaggcttgggcgggcccggccgcggcccacagagccgtccccgcccgcccgcgccccgaccagcccggcctcgggcagccactcaccggtgtccccgtccgcgtcctttctccccgggtcccggccatggcgctgagtgaacccatcctgccgtccttctccactttcgccagcccgtgccgcgagcgcggcctgcaggaggtgagggcggcggggacggcggggcggccgggaccgtgggcggcgggctcggggtagtagaacgtgggctgcggggtgacaggacgcgaaggcggggactgcagactcaggagaggaggatgcgggccacggggatcgcggacttagggtggtaaaaggcaagcagcgccccccgagccccgccgcccgctcacgcccattgccctgtcgcccgcagcgctggccgcgcgccgaacccgagtccggcggcaccgacgacgacctcaacagcgtgctggacttcatcctgtccatggggctggatggcctgggcgccgaggccgccccggagccgccgccgccgcccccgccgcctgcgttctattaccccgaacccggcgcgcccccgccctacagcgcccccgcgggtggcctggtgtctgagctgctgcgacccgagctggatgcgccgctggggcccgcactgcacggccgctttctgctggcgccgcccggccgcctggtcaaggccgagccccctgaagcggacggcggcggcggctacggctgcgcccccgggctgacccgtggaccgcgcggcctcaagcgcgagggcgccccgggcccggcggcttcgtgcatgcgaggtcccgggggccgccccccgccgccgcccgacacaccgccgctcagccccgacggccccgcgcgcctgcccgcgcccggtccgcgcgcctccttcccgccgcctttcggtggccctggtttcggcgcgcccgggcccggcctgcattacgcgccgcctgcgcccccagccttcggtctcttcgacgacgcggccgccgccgcggcagccctgggcctggcgccccccgccgcccgcggtctcctcacgccgcctgcgtccccgctggagctgctggaggccaagccaaagcgcggccgccgctcttggccccgcaaacgcaccgccactcacacctgcagctacgcgggctgcggcaagacctacaccaagagttcgcatctgaaggcgcatctgcgcacgcacacaggtgggcggcacgcacgagccaggagcgcaggcggggggacgcgggaggagaggtcggattcccagcgcgcgccagaaaatgaatttaggacctcccttggggcgtggctcagggggatctggcaggtggtgcacgcttaggactccccaggaggcgtggctcgggaggttggttgggggggcacacaggaacactccctaaggaagtgtgatccgagaggttggggtgggggcttgcacgcttaggacgaggggggcctccggaggttgggaagagcacttagaaaacctcctggaggcgtggctagggagacagtctcagaaagttggggagggggagcaggtttaggagccgctgggcacttggctcagaatccccggggctgaggctcaggtagttggggagtaggtgcgcgtttaggaaccccggggagatgctgcgtctcaggaagttggggagggcgctcaggcttgggactcctctggggacaaggctcaggaccttggggagggagtgttcgctgggaaaccttgagagattccgtgtcttagaatgctggagagagggtgcatgcttaggacccgtcggggagcgtggctgacaacagtggggagtggaccttgcgctcctccgaccccctgggggtgaggatccggattgtggggggagttggggatgtagggcaaggatccctcaggggcgcaacactaccgcggggagcgcgtcaaggccctggttagggataggttgcgctcgccggggtagccatacgtgccctgtcctgggaggggaactgacgcttactctcgccccctccctgcaggtgagaagccctaccactgcaactgggacggctgcggctggaagtttgcgcgctcagacgagctcacgcgccactaccgaaagcacacgggccaccggccattccagtgccatctgtgcgatcgtgccttctcgcgctccgatcacctggcgctgcacatgaaacggcacatgtagccgggacgcccccgcccacctgcgcgcggccgtggcgggtcccacgcgccgggcgcggccccctcccaaactgtgactggtatttattggacccagagaaccgggccgggcacagcgtggctacagagggtctccctcgatgacgacgacgacgacgccaccaccccagcccccgtctgtgactgaaggcccggtgggaaaagaccacgatcctccttgacgagttttgtttttcaaaatggtgcaataatttaagtggcatcttctctcccaccgggtctacactagaggatcgaggcttgtgatgccttgtgagaaataagggccttaatttgtactgtctgcggcattttttataatattgtatatagtgactgacaaatattgtattactgtacatagagagacaggtgggcatttttgggctacctggttcgtttttataagattttgctgggttggttttttttttaattaaaaagttttgcatcttttaaaaaaaatcacagcactggtctggttgcttggaactggggccttggggcacttgggaggaggggggagcggagagtttgatggagggcagccccactaaagcatcgtgtgcagtgggtcctgcgtctgccagcaccgggactgccagctgctgtgcctgcctgccaggaacctgtgggtttttctgtaaatttagacactgcattttaggactgagggagggttattttaaggttgttctttgagccataaattgcctctttgccccacagctggggaaagtgctggtcccactgacgtggcctcctctacgttgaaaaaaataaaactacttacctcttcctggaagcctctgaggttttagccaaatttctggagtgccagctctatatttttatttttatttttaaagggggttaacctgctgagtttctggcatgttctgccctttactcgtctcgacatttagcaagtcttttcttaaggggtgagttccccattctgctagcggaaaacagtgaaacctgcattcgagggccatgcatgaagctcttttccagatgaggaaacggaggcccggagaggtagcggcagggtggtggagttgggttgttagcctgctctgtctgcctccaagggtccctgaaccccactggaagggagtggtagctttctacaatgacccacctgttgtgtgcattggaaggctaggagagcctcctcccctgtaggtctcctggtgcaaaaaattcactgcctcaatggtaggaggtgaccagtctggaaacccacctggagagcagaggagacccctaaatcccaccaccccaagtgtctcaggcaaggaggtatctctccccccagatttcacctgccacccctcaccttccccattctcaggggccccgggtaaccatgaccaccaaccattgcacaagtttccagaaagtgaaaatagctcgtaagcagcgcctgctttaaaacactctcaccccgttgcgacagaggctgggatttcctccctccctgcatccttcctcctccccaactacggcagccctggaaacagctgagaggtgtttggtaatccacgaaaagcagaaatacgatttgacaatctgattcattttccgagagtaaatagcctggcctcacttccgctgctgatgaagggtgtgaatgtttttgagcctcctgtaccctctgcgtgcagcttctgcaaaaaccgtcccaagacagaatgttggcccctcgacctggggagatgatccccctttttaaaagctggcctctgcagtgcaggggcagaagaaggactcgcgggtggtttaaaacaatattaagggtctccaggtttccctgttcagcttaaacttagtgatcaagctatttttcttgcttatttgaaaatgtcttccaggtttctcctggaagcttctgagtccagtgaaaggcaaatcgttcacggggctgaagctgtttctgtttcttgcgtgtatgttctgttggagaacagacagaatagaaagtgtgatagttgtacgtttcagtaagagacaccaactcaggcagcgctaggtcataccgactaatccagaaatatcccatcatcatttttttctgcccctttctgacactcaaatgccaatttccatgatcttctgcatctgtgatgctcagtggagagtgacccagtctgggaacatttttggttgtcaactcgggggtgctgctggcatctggtggacagaggtgggtgatgttgctaagcattctgcagtgtacagacagcccccaccacagagaatagcccagctctgaatgtcagcagtgctgaggttgagacatcgcctctggttcctaaaagatcattgctcttatcagcaagaaggtgactctgtgccacgaagcaagctttggtggcaaatgccacccagaaaaaggtacaaagaaaacctcaccctggggccatcttcacctaggattctacaacccaatcccaatgcaagtttttctttctttctttctttctttctttctttctttctttttttttggagacagtctcgctctgttgcccaggctagagtacagtggcacaatctcagctcactgcaacttctgcctcctgggttcaagtaattctcctacctcagcacctcctagtagctggtattacaggcgcgcgccaccaagcccaactaatttttggatttttagtaaagatggggtttcgccatgttggccaggctggtctcgaactcctgacctcaggtgatccacccacctcagcctcccaaagtgctgggattacaggagtgagccaccgcacccaaactctctctctctctctctctttttagagcaggagatttgtggtcactggctgaattacttttcatggctgtgattttcgctatattctttcttttccccaggcaaagttataatcatttgtcgatgctgttttttcccccagttatacatttgtattgtcattttcatggctgcataatattccttttagatatggcaggagttatttatggaaacaagcactgtgggtaaaagggttgaaaagggtgaaggttttattttgtttggtttgagatagggtctcatctgtcacccaggctggagtgcagtggcacaatcactacaatcttgacctcctgggttcaagcaatcctcctgcctcagcctcccgagtagctgggattacaggcatgcatcaccatgcccagctaatttttacatttttttgtacagaggggatctcactatattgcccctcctgggctcaagcaatcctcccgcctcagcctctcaaaatgctgggattaaagatgcagaccaccaagcccagctatggcagggggtgggggagaggtgacagttttgaggggcttattggcatggtgctggggagagatgtaggagctatttttctgctaggcacttcctgtagttctgggggccccagcacccaggcaggctgcagaatgatgtggtgtgaagtgggaggaggaagggggcgttgtcagagggcaagatgtctataggctcacccctgactcagcacccagccctgtcaacacggttgagtcagcacccacgcccggcagccccaggtggagtcccaggaccataggctcaagctgatttgtcaggtgccagggctgggtggctccgattgccccggcctgagctgtgtcagctgtgccagaccagcgagcatcagccttggagctgggcacagcggtggctcatgcctgtaatcccagcactttgggaggccgaggtgtggggatctcttgagccaaggagtttgagaccagcctgggcaacatagagagaccctgtttctgggtgggtggggggcgggggaagagagagagaagagagaaaaaacaaaagacatttggagctgaatcattctccagtgcggggccaccctgtgcactgcagtgttcaacagcatctctggccttcaccgactcaatgccaattaacacccgtcccctggccagacccgggggctcacacctgtaattccagcactttgggagggcaaggcgggtggatcacttgagctcaggagttcgaggccagcctggccaatatggtgaaaccctgtctctacttaaaaaaaaaaaaaattagctgggtgtggtggcaggcgcctataatctctgtcatctcagctacttgggaggctgagtcaggagaatcactggaacctgggaggcggaggttgcactgagctgagatggcgcctgggtgacatagggagagtccatctcaaaaaaaaaaagaaagaaaccctcagatcagccgtgcgactttgcctgcctgtgcctcagtttccttgggtggaaaatgagtttgctgctgtgaaaatgaaatgagacactaaagctcagagcccacccctggggtgtggccagcacagtgagtgtcctctgataaagctggtgtgcctgaattttaaggccccttcctccctctctctccctctccccacaaccctcttcgctcattcattcattcattcacctgttcattcagcagatgctctgtatggcaagcagatatgactcagaatctcaggagtgactctggccgggcgcaatggttcacacctgtaatcccagcactttgggaggccgaggcaggtggatcacctgaggtcaggagttcgagaccagcctggccaacatggtgagaccccgtctctactaaaaacacaaaaattagctgggtatggtggcaggcgcctataatcccagctactcgggaagctgagggacgagaattgcttgaacccgggaggcagaggtttcagtgagctgagatcacaccactgcactccagcctgagagacagagcgagactctgtctcaaaaaaaaaaaaaaaaaaagtgacgtagcctctgggccttgcccagagtcagtgccaaaatgtttgtcgcatgacctaactttgtgctaacggtggaccctgtgactcgagcttgggtgctttcattctgggcaccttcaacaaattatctctttcaacctccccacaagcctgagggttgcctaagcacccccattttctagaggtggaaagtggggttcagagaggggaaggttagctgggggacctggtgcaggtggcagagctgaggcttcaacccaggtctgcctggcctggccaccgcaactcctcctgtgcctagaaacatctgaatgcaccaatgcatcaggtttgccctgtttccctccacacacaggttctaggggttcctggaagccctgctgagttccttctaggcttttgtctaaaaggaactgagaagcccatttgccaggaatatcccagacagggagggacaaggggtcgggaagaggctgggtgaatagggttccctgaggtgccctataagaagttaggaggaggccgggcacagtggctcacgcctgtaatcccagcactttgggaggtcaaggcaggtggatcatttgaggtcaggagttcgagaccagcctggccaacatggtgaaacctcgtctctactaaaaatacaaaaattagcttggagtagtggtgggcacctgtgatcccagctacttgggaggctgaggcaggagaattgcatgaacccgggaggcggaggttgcagtgagccgagatcacaccattgcacactagcctgggcgacagaggaagactccatctcaaaaaaaaaataataataagttaagacgagcctgggggccagacaccatggctcacgcatgtaatcccagcactttgggaggccaaggcaggtggattactggaggtcagaagttcaagatcagcctggccaacatggtgaaaccccatctctactaaaaaaaaaaaaaaaatacagaaattagccgggcgtggtggtgcacacctgtaatcccaggtactcgggaggctaaggcaggagaatcacctgaacccaggaggcagaggttacagtgagccgagattgcaccactgcactccggcctgggcaacagagcaagactctgtttcaaaaaaaaaaaaaaaatgctaaacatggaattgccataggtcccagtgattccattcctaggtatagtcccaagagaaataaaaaccgggacacaaacagatacttgcacacacgtgttcgaggcagcaccatttacatgcgccagacggtggaaacagcccaaatacccatcaactcatgaatcaataaaagtgtggtatatccatatgacccagtggtttttgtgtttgttttttgggataaggtctcgctctgttgcccaggctggagtgcagtggtgcgatcacagctaactgcagcctcgaacccctgggttcaagcaatcctcctgcatcagcctctcgggctggttcttactgggggctcccctgagtgcagagaacaggcccaagctgatgccagttagggaagtcatctctatagttctagaagggatactgagcccaggaggctggagacaggggcctcaccaaccctctgctcgtagcctgagctctttctccagcgtgatttgatctgccccatcaccgtgttcttttctctctcatcccatattttctttctttcattctttctctttattgtgattaaatatacataacataaaattgactgtttttgttttgttttgtttgagacagggtctcactctgttgcccaggctggagtgcagtggtgcgatcacagctcactgcagcctcgacctcctcaggctcacgtgatcctcccgcctcagcctccagagcagctgggactataggagtgtgctactacgcctggctaatttttctattttttgtagagcctgagtctcactgtgttacccaggctggtcgcaaactcctgggctcaaatgaaccatccaccttggcctcccaaaatgctgggattacaagagtgagacattgtgcctggctaaaattcactttttttttttttgtgacagagtcttgctctgtcacccaggctggagtgcagtggcacgatctcggttcactgcaacctcccacctcaagtgattctcctgcctcagcctcccgagtagctgggattacaggcgcacgccagcacagccggctaatttttatattttcagtagagacggggtttcaccatgttggccaatggtctcaaactcctgacctcaggtgatccgccccccttggcctcccaaagtgctaggaatacaggcgtgagccaccacacccagcacaaaattggttatttttaagtgttcagttcagcagcattcacagcattgtgccaccttcaccaccacccatctccagagcttttcccttcttcccaaactgaaactttgatcccattaaacactcacttcccattctccctccccagccactggcccccacccttcttccttctgtctctacaaatttgagcactctgaggacctcctaggagtggaatcatacagtatctgtcctttcctgtagtttatttcactcagcataatgtcttcaagattcatccacgtggtagtgtgtgtcagaatttccttcctttttatgactcagtaatattccattgtgtggaaggaccacattttgtatgtccattcattccttgatgaacacttggtcatttccaccccttggctgctatgaacatgagtgtgcaaatacccattccagcccctgctatcagttttttggggctgtgtccctaacagtggaatggctggatacccttttttactttttactgttagtattttttgagacagagtctcactctctcgcccagcctgcagtgcagtggtgcagtctcagctcactgcaccctctgcctcccgggttcaagtgattctcctgcctcagcctcccaagtaactgggattacaggcgtgcaccacctcacccagctaatttttgtatttttagtagagacgacgtttcaccatgttggccaggctggtctcgaactcctgacctcaagcgatcctcctgcctcggcctcccaaagtgctgagattacaggcgtcagccaacgcgcctggcctgggtatccttttttaaactttattcgtggctgctgataacgctcaaaagagtttttctttccttagcagctcgcctaagagccattgacccaggctgagcatcgtctgcgagcctccctgagagctcagattcacaccagccggcatctgtcgcctcagcctgcaacattctgggcctcgatttcctcttctttgaaatgggggtaacagcgcagagcagtgggagcacggccggtgccctggccttgggggccgcccggaaatcggggttttgcagcagcttgggttgtgcagagaggcagaggctgtcagggagatggacgggcctgaggtggaggtgccgctcacacccggcacacccgccgcctgctcagcccacagcctgctctgcgcagccagctctgcgcagccagctcccctccccacctaggccccggccatctcaagacagcctcctccggaggggacacagactcctgcacaccagacccagagactcttaggccggcgactaaactgaaaagccctcactctgcagggtggggaaactgaggcccgggtatccaaatcctccggcagacagacgccaaccgacctacatgggtcttggggtcttcctgagccacaaacgcaaatcccacaggaggagctggtccctcaggtggggttcctaccagggacatggcttgccaggatttgaccccgttttaacctagaacagccaggtgtgctggctcatacctgtaatcccagcactttgggaggctgaggtgggaggaccacttgaggctgggagtttgagaccagcctggggaacatagcaagaccccatctcttaaaaaaagagcgtggtagcaggcatggtagcatgcatctatagtcccaactactcaggaggctgaggtgggaagatcacttgggcccaggagtttgaggctgcagtgagctatgattgtgccactgcactctgatatgggtgatagagcaagaccctgcctctaataaataaataattatttttataatttattataaaattataaatgttataaaaattaatttaatttaattaaataaaaaaagcaaggtagctcatgcctgtaattctagcactttgggagaccaaggtgagcagatcacttgaggccaggagttcgagaccagcctggccaacatggtgaaaccctgtctctactaaaaatacaaaaaaaaaaaattaagccgggcgcggtggtgtgcaggtatagtcccagctactcgggtggctgaggtatgagaatcacttgaacccaggagatggaggttgcaatgagccacgatcacgccactgcactccagcctgggtgacagagtgagtccctgtctcaaaataagtaaataaataatatcatctagaacgatgtaaacagaacattgcattgacattttgtcaattgccacaaaattgacattttgtcaatggtttgtcattgcaagccattttgttttttctctccccgccatcccccctcctttttctttaaacatggggagtttataaatccatgagacctaacaagcagctataggacactccacacaacagcaggacacactttcttcttgagggtgcaaggaacattccctgggagaggccaaagaataaatccagtgcattgaaaaggatcgcaattctataaagtatgtcctctgaccacaatggaatgaagtgagaaataagaaacagagaggaatttggcaaacttaagaaatatgtagaaattcaagaacgcacttgtaaagacaaggaggacctactctaagattcatcagaaaatcccagcatttgagaccagcctgcgccacatggtgagaccccatccacagaaaaaatacaaaaaatcgccgggcctggtggcgtgcacctgtaatcctagatactcgggaggctgaggtgggaggatcacttgaaacagggaggtagaggctgcagtgagccgcgatcgcatcactgcactccagcctgggcaacagagtgaggccctgtctcaaaaaaaacgaaaagaaaagaaaaaaagaaaaaggccatgtgtagtggcttacacctgtaatcccagcactttgggaggctgaggcaggtgaatcacctgaggtctggagttcgagaccagcctggccaacatggtgaaaccccatctctactaaaaatacaaaaaaaaaaaagacaacacacacacacacacacacacacacacacacacacacacacacaaaacaaactagctgggcatggtggcaggcacctataatcccagctactcaggaggctgaggtaggagaatcgcttgaacccgggaggcggaggttgcagtgagctgagatcgcatcattgcactccagcctgggcaaaaaagcaacactccacctcaaaaaaaaaaaagacaaaaaaacattctagcagtgggaaggtcctttaggggcctaagctcctgagtggggaccagtccggctttgtgcagggactcagtgcacctggggctctctctgcagatatgagatgtgcatgggctcttctggatgttgccctagtgagttctgagggctcctgtgggctcgtagcttctagagtggatgattcccccaagatcactgtggggaacaccaagagtggctgctccccacagcttcaaggctgccagtggggactccactggaggtccgcttctggggggctgccacgtgtccccagctttagtcaggacccctcccacaacagcatcccctgctcccatccacatctccaggtcctccaactcctgtgacccttccccaatcccacatctttgcacaggctgttcctcatggcaaaaagcccttcctgtgtgtccgtggggcagatgccagtccgccccccaaggcctggctccggcatcacctccactgggaagcctgccctgattcccatagaagcaccccagcctgccccgtgccagcttggacctcacagggtgggagcgccagatctgtggctggctcctccttcccactagactgggcagcagcagagaggggtgctgaatgactcgggggacctggttgacaaggggtcaggaccgtgaaggggacagtggttttactcccctgtcatagtcacagagagcaacacacaaaatccaaggattcctgggatgacagaatttctgacctcaaggccaagatgatgctgggtagagtgtgcagcgtgtagtgtagacggggacttggatccgctggccctggctgcctggagatgctgggtagagcacgtagtatgcagcgtagacagcattcagagtccctcagccctggctgcccctacctctgccccttgcccctggccatggccctgggcgcacgcctggccctctctgagccacagctccctcccaccagggctggtgagaaaagtaaaccgagagtgctgtttcctgccaccctgctgggtgctcagcctccctccacccgcatcctctcgagtgggtagaatcccaactgggggccctctggcagggtccgggagctggcacacgagcaggcactctggctcggccatgcatccgtccatgggccactcgccgagacacgtggctctaaatggacacagtcattcaggaaatagcgcctcgcccaccgaatgccaggcgccactcagcaggctgctgtaactccgcaggctgcctcctgaattgccctccactttcaaccttgaccccaggttggcctttctggggactgtcccaagatcgagagacacacttcacagccaagccctcgtctgcagcctcggagctatgagatgttccagctccagggaaaaaactcaggaatcagaagtctggccagccccatcccactcctcttggctttaatgtaactcagaggcaccgatcctggctcttggggcagaattctccacattcctggtgtgtttccgttgaaccccaaaccgcaaacacatcctgacatctcatttcctcaatgtgccctggtggtgactcgggccaccttgccgggagctcgttttgagtcatacagagatttgtcgaaggaagggtttctcatctcagaagttggaggccgttcccaccaacctccctccctgcatctgtacaagaattgctggcggggctgctattccctgatgcttggatctgagctctcagtgactcgggaggcactggccaggggccctggacaaatctaagctcagttccttatgtcaccactgtcaacctcaggcacgggaaggcggctctcagtctctttcctcctctgtagagctgggctcttagcagctatcttggccgggctctatctcaaatggatggaatctgggctatgcctgacacatagtaggtgctcagtgaaggaatggtgcccattagtgagagagggagacagggctgggcatggtgatgtgcacccgtggtcccagctacttaggaggctgaggcagaaggatccctagaggccaggaggtcgagacagcaatgagctatgattgcaccgttgcactccagcctgggcaacagagcaagaccctgtccttaaaataataatagtaataataatttattgaactcctgacctcaggtgatccacccgcctcggccttccaaagtgctgagattacaagcatgagccactgtgcctggctgaataataatcactaaaaaattaatctaaacataatttctaggctgggtgcggtggctcatgcctgtaatcccagcactttgggaggccaaggcgggcagatcacctgaggtcaggattttgaaaccagcctggccaacatggcgaaaccctgtctctaatttaaaaaaaaaagaaaaaaaaaattagcccggtgtggtggtgcatgcctgtagtcccagctgctggggaggctgagaattgtttgaacccaggaggtggacgttgcagtgagttaagatcatgccactacacttcagcctaggcaacagagagagaccctgtctctaaataaataaatgagagagagagagaaaaaaaatccaaggaaacaagcccattcattctacttaattccgctggtctctgggaggcaggttgggggtggagaaattccatgtttttacagaatcctgacgtcaccagcaactgccccaccaggagctaacttcagcacgggcggagggagggtgtctgcccacgacctgaccttgaactgggcctttcttaaatgtaaatgtgcatctcctttggtgcttttttaagtgggagaggtccctgaaaggttgttgcctggaggaaaagttttggcaattaacttttattattgtttgcttgcttaaagaaactgggggcccagagcagtgagtggcttatgcctgtaatcccagcactctgggaagccgaggcgggcagatcacttgagcccaggacttccagaccagcctggccaacaaaaattagccaggcatggtggagtgcacctgtaatcccagctactcgggaggctgaggcagggggatcacttgaacccgggaggcagaggctgcagtgagctaatattgctccactgcactccaacctgctgggcgacagagtgagactgtctcaaaaaacaattgggatgttcatcaaagcactattcataacagccaaaaagtagaaacaacccaagtgtccattagagaatgaataagaaaactgtgatccatacatacaatggaatattattcagccatgaaaaggaatgaagcactgatccatgctacaatgtggatgagcccccaaaacattctgagtgagagaagccagacgcgaaagcccacatagtgtgagattccactgatacaaaatgcccagaacaggcaaatccagagagacaggaagcagatgagtggctgccaggggctgggggaggggaatggggagtggctgctgatggggacagggtctcctcttgggggatgcaaatgttctggaattagacagaggtgatggttgcacaacattgtgaatgcacgaaatgccactaccgtgtacacttcatggttagttttatgttatgtgaatttcagctcaattttaaggtgtaaaaaaagcaattgagaataagttgcttctgttgtaaaacgttactttttttttcagacggagtcttgctctgtcgcccacgctggagtgcagtggtgcaatctcggctaactgcaacctccgcctcccaggttcaggtgattctcctgcctcggcctccccagcagctggaattaccggcgcccgccaccactcccagctaatttttgtatttttagtagagacgggtttcactgtgttggccagaagggtctcaaatgcctgacctcaagtgatccacccaccttggcctcttaaaatgctgggattacaggcatgagccaccatgcgcagccacattactatttttaatacagttattttgtcaatataacataaagtttggaccgagtatccactgatgaatgaatggataaacaaaatgtggtctatccatctatccagacaatggaatagtattcagtttttaaaaagaaagagattatagggccgggcgcggtggctcacgcttgtaatcccaacactttgggaggccgaggcgggcggatcatgaggtcaggagttcgaaactagcctggccaacatggtgaaacccagtctatactaaaaatacaaaaattagctgggcgtggcggtgcgtgcctgtaatcccagctactcgggaggctgaggcaggagaattgtttgaacccaggaggcggaggttgcagtgagccgagatcacgccattacactccagcctgggcagcagtgcaagactacaattcaaaaaaaaaagaaaagaaaagaaaagaaaaagagaaagattctgacacatacatgctccaacaggaactatcctaagtgaaatacgccagacacaaaaagagaaatactgtatgagtccatgcatcagattcatagagacaggaagtagaatggtgggtgcgaggggctgggggaggaggaaatggggaatgagtatttagtgggggcagagtttcagttttacaagctgacaagagctctgctgcgtaacatgaatggactggggtgagccgtgagggctggagggccctcagacaagagaaaggatgacagttccaaggcttcaaacagatgctctgagagaaccagtcctcagaaaggctgagaatccctggaatttttcctgggctggaagggatctgctctatggcttaaaggtcttggccaagggcctgaagaaccacccatcttccagggcccaggcactccgactcctcaaatttaaatacaggcgctttctacgcatgagtgccaaaccatttccagtaagtctcattgtcagctataaaaataaccactgttgaagcagagacaagctcgtgatgcagccaggcagtgccacagagaggcaatggcatctgtccctgtcaaatggaaagtcccctggccaagcctctgaattcaagtgaacatcttggtcttggatgtgaccatctgaatggtggtcgagaaagtgcttggtccatagaaggcacccaggacactcgagcccccttctctcccatgaccttcgtacaatggcacggaatggagacgcagggctgggacttcccctccaccacaccggtttcctttacaatgagattccattcctataatgaggaataatgtagtagcttagttaatacagacagaactgcccctcagtcggttcttgggtagtggagctagaatatacaggccctgctctaaaagctcaaagcaatccctggacagtaaccatagctttaataatactcatctgggccgggtgcggtggctgaagcctggaatcccagcactttgggaggccgaagcgggcaaatcacaaggtcaggagttcgagaccagcctggccaacatagtgaaagcccatctctactaaaaatacaaaaaaattagctgggcttagtggcgggcacctgtaatcccagctgctcgggaggctgaggcaggagaattgcttgaacccgggaggcggaggttacatgagctgagatcgtgccactgcactacagcccaggtgacacagtgagactccatctaaaataataagaataatacccatctgaatgaataataacaaaaaccagtaccactggctaggaggcggaagtggggttatggggaattgctcaatgggtacagagtgtcaatttcacaaaatgagaaagttctagagatctgttgcagaatggtgtgaatatatttaacactgctgaaccacgcacttgaaagtggtttttttaaaaaaaaagtggttaaagtggagctggatgcagtggcatgcacctgtaggcccagttactccagaggccgaggcgggaggattgcttgagcctaggagtttgaatccagcccgggcaacatagtgacaacctgtctctaaaaaaataaaaaaagaataaaaatttctataaattaaaaataaatttaggccaggaatggtggctcacacctgtaaccccaacactttgggaggatcccttgagctcaggagtttgtgaccagcctgcacaaagtagtgagactctatctctagaaaacatacaaaaattagccaggcgtggtgctgcatgcctatagccccggctattcagaaggctgaaatgggaggatcacttgagcccggggtgcgaaggctgcagtgagccgagatcgcaccactgcactccagcctgggcaacagagtgagaccctgtctcaataaataaacacatacataaaataaaataaatgaataattttttttttcctgagacagagttttgctttttcagccagctggagtgcagtggtgcgatctcggctcactgcaagctccgcctcctgggttcacaccattctcctcagcctcccaagtagctgggactacaggtgcccgccaccacacccggctaattttttgtatttttagtagagatggggtttcaccgtgttagccaggatggtcttgatctcctgacctcatgatccacctgcctcggcctcccaaagtgctgggattacaggtgtgagccaccacacccggctgaataaatttttaaatggttaaaatggtaagtttcatgttttttatcataattaatattttttttttttgagacagagtcttgctctgtcacccaggctggagtgcagtggcacaatctttgctcactgcaacctgcacctcccaggttcaagcgattttcgttcctcagctcccaagcagttgggattacaggtgtgtgccaccacaccccactaattcttgtatttttagtagagacggggtttctccagattggccaggctggtctcaaacttctggcctcaagtgattctcctgcctaggccacccaaagtgctaggattacaggtgtgagccactgagcttggccataattaaaaatttttaattaaaaaaaaaaaaatccagccgggcgcggtggctcacgcctgtaataccagcactttgggaggccaaggcgggtggatcatgaggtcaggagatcgagaccatcctggctaacatggtgaaaccccgtctctactaaaaatacaaaaaattagccaggcatggtggcgggcacctgtagtcccagctactcaggaggctgaggcaggagaatggcgtgaacctgggaggcggagggagcttgcagtaagccgagatcacgccactgcactccagcctgggcaacagagtgagactccatctcaaacaaaacaaaacaaaacaaaaaaaccactactactgtttctactactttacttgaacatctagaatatgccctgagggatagctgttatacctccatttttttttttctagacggagtctcagtctgtcttgaccaggctggagtgcagtggtgtgatctcagctcactgtagcctccgcctcccaggttcagcaattctcccacctcagcctcctgagtaattgggattacagtcacccgccaccacatccagctaatttttgtatttttagtagagacagggtttcaccatgttggccagcctggtcttgaactcctgacctcaggtgatccacctgcctcggcctcccacggtactgggattacaggcatgagccactgtgcccggccaatgacctctattttatagatgaagaaaaatggggactccaagtagtgatttgagcaacccaaggtcacactctccaggggtgaagctgtcttcacaccaactctgacttaaggctgtgccttttccaagatgtttgttgcccctccatggcttcaacatcttctctggtctacctcaggggaagagaagccacaggtatcttgctccaggatctagaaccggaaaataaaccagggttctggtccaccatattgttctcttagaactaggatcctcatttcctttaaaaagtgtgtttacagttgaacaattgctacatcttgtcttgagtctttttttggctctcgtagtggaaattctgccctttgtccttagtacaaagaaataatgttcatcacagaccaggatctcaaagtccttgtttctggcctcagaaagcgttctctctcccaagtgaaggttaatataggaataacaatggaaagtcacagaattgctcgtttattaaactagtgtttcttgcaatggtgttttaaaagtttataagagatatattattgatatataacatattgatataattacacattgttgatatatttttgagacattatattaggggagttttttgttgtttttagagttggggtcttgctctgtcgcccaggctggagagcagtggtgccatcgtagctcacctcagcctcgaactcctggcctcaagtgatccttctgcctcagcctcccaaagtgctgggattacaggcatgaaccattgtgcccggcctgtacattagtgttatttgaactaggatttcccccttaactatgaaattaaggttatcaagagtgagcaaaatattttaaataaagatgaggctcataagataatgtttattcaatttttctttttttattatctgagatcctaaaatatgtgtctttttggagacttgaataatcatcttaagggcttttagagctagaaaggtcttcactgggccgggcgcagcggctcacacctgtaatcccagcactttgggaggccaaggcaggcagatcacttgagaccagcctgagaccagcctgagagcagtttgagaccagcctggccaacatggtgaaaccccgtctctaccaaaaatacaaaaattagccgggcatggtggtgggtgcttgtaatcccagctactcaggaggctgaggcaggagaatcacttgaacccgggaggcagaggttgcagtgagccaagactgtgccactgggtgacagagtgacactctgtctcaaaaaaaaaaaaaggaaaaaagaaaggtcttcactggttgtctggtccaacctccttggccaaataagaaaactgaggtgcactgaggttaggtccaaggtcatgaatagagagcacccctgcacgtcagtcagaaaggaaatcaggctgggcacagaggccacgcctgtaatcccagcactttgggaggctgagtcaggaggattgcttgaggtcaggagttccagaccagcatgggcaacatagagagacctcatctctatgaataatttttttttttttgaggcagtctcaccctgttgcccaggctggagtgcagtggtgcgatatcggctcactgcaacctttgcctcctgattcaagcgattctcctgcctcagcctcccaagtagctgggactacaggcacccgccaccatgcccagctcatttttttgtattttcagtagagaccgggtttcaccgtgttggtcaggctggtcttgaactcctgacctcacatgattcacccgcctcggcttcccaaaatgctgggattacaggtgtaagccaccatgcctggccaatttttaaaaagtagctgggcatggtggcacatgcctgtggttccagttactcaggaggctgaggtaggaggatggcctgagcccaggaggtcgaggctgcagtgagctatgatcacaccactgcactccagcctgggcaacagagcaagatcctatccccaaaacaaaacaaaaccaggaagcaaatcaaggagtgatatttaaagacccactcggctgggcgcagtggctcttgcctgcaatcccagcactttgtgaggctgaggtgggcagatcacctgaggtcaggtgttcgagaccagcctggccaacatggtgaaaccccatcttcactaaaaataaacaaaattagcccggcgtggtggtgggtgcctataatttcagctactcggggagctgaggcagaattgcttgaacctgggaggtggaggttgcagggagctgagatcacaccattgcaccccagcctaggcaccaagagcataactgtctcaaaataataataataataataataataatgataataataataatataataaaaataaagaccactcaacgtaaacacgactctacccaggcaagcccacatcacgtcatctctttggaataagcttgcgataaccatcatatttccatttccttttatatttttccaaaaacagctcatgatacaatttgtacaggtcctagtaactttggggaaaattttggaaaaaaaaaagtagcatgtttcaaaggaacttgatctgataagaggcagaaatattgactccattatttcaagaggcagtttctttgtttcccagacgcttcctgacagttttaaaaatagccttccacaactgttccaggatgagaatgtccttttacataaaatgggctttgaagatgtgatttcatttactcagaggaggctgtagatcattcgtcatccttttccaaaacatggcttggaccgggcaatgtgggcccttgaattccagttgaacaccagtccaaactgggttgttggatgcggagaagataaagggtacccacaaagaggacacggctcgttacaatctgggagacaaaacgcaatggggttgcagtcaaaagttgcctcttgcgaccaggtgtggtggctcacgcctgtaatcccagcacttcgggaggctgaggcaggtggatcacctgaggtcaggagttcgagaccagcctgggcaatatggcaaaactccatctctaccaaaaaatacagaaattacccgggcatggtggtatgtgcctgtagttccagctcaagaggctaaggcaggagaatcgcttgtacccaggatgtgaaggctgcagtgagctgagatcatgccactgcactccaggctggctgacagagcgagactctgcctctaaaagaaaaaaaaaaaaagttgcctctttcggatgggtgtgtcggctcacccctgtcatcccagcactttgggaggctgaggctggaggattgctttaggccaggagtttgagaccagcctgggcaacatagcgagaccccatctctacaaaaaaaaaatttaattacctgggcatggtggtgcacacctgtagtcccagctacttgggaggctgaggtgggaggatcacttgagcccaggaggttgaggatgcagtgaactatgatcgcaaccaccgcacttcagcctgggtgacagagtaaggccctttctctaaaaataaagaaacaaaaataaaatgaaagttgcctcttgtctgctgtattggaggtttctgtatctgctgattcaaccaaccctagatcgaaactacttgaaaaggggccgggggcggtggctcacgcttgtaatcccagcactttgggaggccaaggcgggtggatcacctgaggttgggagttcgagaccagcctggccaacacagtgaaaccccgtctctactaaaagtataaaaattagccaggcatggtggcgggtgcctgtaatcccagctacttgggaggccaaggcaggagaatcacttgaacccaggaggcagaggttacagtgagcggagattgcgccactgcactccagcctgggtgacaagagagagactctgtctcaaaaaaaaaaaaaagaggcagggcgcggtggctcacgcctctaatcccagcactttgggaggccaaggcaggcagatcacgaggtcaggagatcgagaccatcttggccaacatggtgaaaccccatctctactaaaatacaaaaaattagccgggcatggtggcaggtgcctgtaatcccagctatttgggaggctgaggcaggggaatcgcttgaacccaggaggtggaggttgcagtgagctgagatcgcgccactgcactccagcctggagacagagcaaggctccatctcaaaaaaaaaaaaaaaaaaaaagagagagagagagagaaagaaaccatttgaaaaaaaacaatcaaaagttgcctcttatgtgaaagatctgatggctaggaggggtcattgttcattttctcagacgtgaccttggcatcgagtatacgttagcatgtcagtcgccacacgtctcagtgacgtgcgcttcagggcacgtgggcgaaatggcatcctgactccaacttgctctaaagtgcttctccagagcaaaggaagacagccatgcggcaaaggtggaaaatctggatgacagttgacgctgggtgggggtgtttactgtccttttctcttcaactattatgtttggaaattttcatcatacatttgttccaattggatactctattcttcaggaaagggcgtgagtgtcctttgccgtggaagagactgccaatgggagaggggatggatttgtggatttgatgttgattatttacacagcaggggagtgtgtgtgtgtgtgtgtgtgtgtgtagcagggaaggaaggaaacaggatttgagactggcttctaactttttaaagggtctgaggacctctttaaaaatcagatggaggctgggcacagtggctcacacctgtcatcagcagcactttgggaggccgaagcgggagggtcacttggggccaggagttggagatcagcctggccaacatagtgagaccctgtttctataaaaataaaaataaaataaaaattaaaaaaaattagccagggccgggcacggtggctcatgcctgtaatcccagcactttgggaggctgaggtgggcagatcaagaggtcagtagatcgagaccatcctggctaacacggtgaaaccccgtctctactaaaaatacaaaaaaatttgctgggcgtggtggcgggcgcctgtagtcccagctactcaggaggctgaggcaggagaatggcgtgaacccgggaggcggagcttgcagtgagccgagatcgtgccactgccctccagactgggtgacagagcgagactccgtctcaaaaaaaaaaaaaaaaaaaaaaaaaaaaaaaattagccggatgtggtcagctactcaggaggctgaggcaggaggatcacttgagcccaggagttcaaggctgcagtgggctatgattgcgccatgcactccagcctgggtgagagagcgagacccccatctcttaaaaaaggggaaaaaaaaagataaaaagttatgaacactgcaaacccacatacaataaaaaacaaaccagggctgggtgcggtggctcatgcctgtaatcccagcactttgggagtctgaagcaggcgaatcacgaggtcaagagatcgagaccatcctagccaacatggtgaaacctcatctctaataaaaatacaaaaattagccaggcatggcggcgtgtgcctgtagtcccagctacttgggaggctgaggcaggagaatcacttgaacccaggaggtagaggttgcagtgagctgagatcacgccactgcactccagcctggtgacaaagcaagactccgattcaaaaaaaaaaaaaaaaaaaaaagaacaaaaacaaaaaaccagcaaatgtgcattcaggggttcactgctttccctaaaaacgtcccctcccctgggtaagagctcctaattcaatacatggttttccatttctaagatatcaagagccatcacctgcctcttctgggtacggtgaatatgcaaataagcagaagacaacaagaaactagaaaccctgaagttttctaagaaaccctcaattcttttctcaaatcagcaaaacgagcctccgcccctggctggcttcggagctctgggcaaatgactgcagggaatgagtctcagttttccctcaggaaaatgggctaacatccaccctcttcatttacaaggttgctttgagtttccaacaagataatggaagctgaatcgctgtgaaaattgtgaagtcccaaaccaaatggtgccaaagctgtgactaccctggagagaggtgactcagcgccttctccaaagggatctatcacggcagaagcacatggcttgggaccttcagattcactctggggttttcctgcaggaggaaggaagtattgggaattgcctccggccatgaccactttcaggaagctgctcgtttttgcagagaagattaggggcatctcagaggttacaaagcccacgaggccccaccaggccccaatccacaaagcaggcccattccatgggcaccaagaagacgtcccctcccaacaccctcatctccaggactgcagggacccctcgagggtctgtaacctggaaaagggggattaccaaaggtttggaatctttacattcgcccaaatccaccataaacttcagtttatggtttatagatgacccttgaacaacacaggtttgaactgggtgggttcagtcatatgtggattttctttgttttgagcccgagtctcactcttgttgcccaggctggagtgcagtggtgcgatctcagcccactgcaacctccgcctcccgggttcaagtgactctcctgcctcagcctccctaatagctaggattacaggcatctgccacgacacccagctaatttttgtatttttagtagagacggggttttaccatgttggccaggctggtctcgaactcctgacctcaggtgatccactcgcctcagcctcctgaagtgctggaattacaggcatgagccactgtgccctgcctgtatgtggattttcttccacctctgccaccccaagaccaacccttcctcctcctcctcctcgggttactcaatgggaagatgatgaggaagaagacctttatgatgatccacttccacttaatggatggccaatattttttctcttccttttcctgaggattttctttttttgtttttggagatggagtctcgctctgttgcccaggctagactgcagtggcacgatcttggctcactgcaacctctgcctcccaggttcaagcgatcctccttgtctcagcctcctgagtagctgggattacaggtgcctgtcaccacgcctggctaattttttgtatttttagtagagatggggtttcaccacattggccaggctggtctcgaattcctggcctcaagttatcctcccacctcggcctcccaaagtgctgggattacaggcatgagccactgctcctggccttttttttttttttttttttttttttgagacagagtcttgctctgtcaccaggttggagtgcagtggcacgatctcggctcattgcaacttctgcctcccgggttcaagccactctcctgcctcagcctcccgagtagctgggattacaggtgcccactaccatgcccagctaatttttgtatttttagtagagacggggtttcactgtgttggccaggatggtctcaatctcctgacctcttgatccacctgccttggcctcccaaagtgctgggattacaggcgttagccaccacgcccggccctgtattttcaatctcatgaattactgccctgagacgagtctatgtaacaaaatatctgaggctgaaaaactgctttttaaaaataaatctacctgaggccaggagtttgagactagcctggccaacatggcaaaaccccatctctactaaaaatacaaaaaattagccaggcatgttgcctaatgcctgtaattccagctacttgggaggctgagacaggagaattgcttgaacttgggaggtggaggctgcagcgagctgagatcacaccattgtactccagcttgggtgacaagagtgaaactctgtcccaaaataaaataaaataataaataaaaataaatctatgtccagtggatccaggtcaacaccagccttctaagtcatgttgatgacatggatctttgatgtgatttgatgtcaatacacttcatctctgtggtcttcctcccccaagtccagctccacatctagtcacgggaaaaacatcagacaaatcccagtggagggacattctacaaagcacctgaccagttctccttgtaactgtcatcaaaaacacacaacgtttgagaaactcacacagcccagagaattcttttttttttccttgagacaagagtctcactctgtcgcccaggctggagtgcagcggtgtgatctcggctcactgcaacctctgccccccgggttccagcgattctcctgcctcagcctcctgagtagctgggattacaagcgcctgccactgcgcccggctaatttttctatttttagtagagacggggttccacccagcccagagaattctaacgagatgtaaggtctgaatgtcatgggggatcctgggacagaaaaaggacattagggggaaaaacgaattttttttttttgacagggtcttactctgtggcccagactggagtgcagaggtgcgatcttggcccaccacaacctccacctcccaggttcaagcgattctcctgcgtcagtctcccgagtagctgggattacaggcatgctccactaccacccggctattttttgtgtatttttagtagagacggggtttcaccatgttggccaggctggtcttgaactcctgacctcaaatgatccacctgcctcggcctcccaaatggctgggattacaggtgtgagccaccgtgccctacctgcatttttttttttagacggtgtctttcttgtcgcctgggccagagtgcaatggcatgatattggctcactgcaactccacctcctgagtttcaagtgattctcctgcctcagcctctcgagtagctgggattacaagtgcgcaccaccacgcgcggctaatttttgtgttgtttttttttagtagagacagggtttcactatgttggccaggctggtccccaactcctgacctcaagtgatcccccccacctcggcctcccaaagtgctggaattacaggcatgagccaccgcactcagccaaaaaaacagagcaattctgaataaagtaaggactctagttaataataatgaatccgtattggttcattaattgggatgtaagtaatgtgtaatgtaagatgttaaaaataaggtaaactctctaaggggcttatgggaacccttcgtattttctttgcgatctttctgcaaatttaaaactggccaggcacagtggcacatgtctgtaatcccagccctttgggaggctgaagtgggaggatcacttgagcccggggaagtggaggttgcagtgagctgagatcacaccactgcactccaccctgggtgacagagctcagaccctgtttcaaaaaaaaattttttttaaggataaattgtctaaggggcttatgggaactctttgtatctttgtgatttttctgcaggtttaaaactgtcctaaaaaataaagttggttaaaacataaaaatgggcagggcttggtggctcacgcctgtaatcccagcactttgggatgctgagacaggagaattgtgtgagtcaaggagtttgagaccagcctgggcaacatggcaagatctcatctcttaaaaaaaaattttttttaaaagtaaaaacttaagatttaaagagcaatgttccacctggttgatctgcttcctgatacccatgcagggaaaacaatgtttacagagattaaagaagcttctcttgttttgtattaaaatattttatattaatcattcaaacttcattttatacaacgagtgcatacaccactgggggagtgtctgactgatgcgtgggagggcgggtggggatgtctgcagctatgagtagggaggaggcggggaagccctgggtgcttcctctcctcgactgaccgctgtgtgttcgtccccagaggaagagcgggaggcagtcagccccgggggggatggcacagtggagagacggacctgcagaagtggtggccaaggcctctgtaagggcttccccaggagatgtgacctttccaggtcttgcagccgagtctgctcaccctgaacaagcccccgagtcccggtccttggagtacggtggcgacggtgtgtgtgtgtatatatagacatctgcactgccccctctctggaacccgcccgtgccctgtcccgcctacacacggccctcgcctaggcggcaggcatgtcagccttgctgagcgcgatggccagttccaggtcctcctgctcctgccgccgcagccgcgccagcctctcctgttccgccttctcgctctcccgcttggcccacgccagctgctgctcctcattgccaaactgcaaaggaaaaacggagagtgggtgatgtggccctggggctgggacctgcaagctggagggaggcagggaatgcgtgggaggggtcagggtcctgcccaccgcccagcggagggtccgatgtgcaggggataagcatgtcttggctgggcccagtgggcgtgcgagcctgtctcaggccccccatctggaaagcagagtggacgggatgcatgtgattgagtgtgaccttaaccatgacctctgggcctcaaagaaaccagccaccccgccccacgcagagaagtgaggatgggcccttgacgctggtggccaagaggtgcaaagatggggaacttccagcgtgcatggctctaaagccccacggcgcagacaattctgcactctgggaatgtggtatttctacctccagccatgctccagagagctctgagaccctctgagggtcattttctttttctttttctttttttttttttgagatggagtctcgctctgtcgccaggctggagtgcaatggcgcgatctcggctcattgcaacattcacctcccaggttcaagggattctcttgcctcagccccctgagtagctgggattacaggcatgcgctaccatgcccagctaatttttgtatgtttcgtagagacggggtttcaccatgttggtcaggctggtcttgaactcctgaccttgtgatccacccgcctcagcctcccaaagtgctgggattacaggcgtgagccaccgcacccggctctgagggtcaatttctcccagaacactgacaaaaggtgtggcacttacactgccatttagtcaagtttttatccgtggggtgtttttctaaaatgttcagttaaaataaaaacttaaaaaagggagaaaaccatcttgatgctgagataggtgatttcaaacaactcaaagtactttagtcatgaaaagaaaagccacatcccacaagctcctcccccagggtgggtcccaatgtcccagacttccctgagaggtcactggcatcatcggccccctcaggaaagctgctgctgcttagggattcaaaggattcccttattaatgtctctctgcgatgcactgcctctgaccagctctctgctcaacactggagtaacaccaaagataacatgcgcagtggctcttccccaggcacccttgggagcagaaatatacaaacaatcccagaacgatccaggacccaaggacccaggctctcgaggagggccctgcagactaacccaggaaggtgggggaaagaagcacacaggaacactcacggcctctccaccacacgcagcactaggtctgcgtgacaacctgggggtgggcccgctgtcatctcatccctctgacagctggggacactgaggccagggaaggggtggctcacactctagactttttcccccccaggcctgtggggagcaggatactaggtgaaactgacagggaggatgcgtccctgcgaggttctgggtgtgaggctcagtgcccgaccttggggtagccaggatgaagcgtggggtgggataagccagactgaggaggggctcgtgggccccaggaaggagctgggatttccccgtggaggctccttgggcgagcgagttgggtgatcagattggcagcgtctggatatttcacggcttgatggtggcatgagcgggaagcaggagagaggagggccagatggcagggctggggggactgggcaaggtgcaggagcagataaatgcaaggaacctggttgggaggcagatgtggcagtgagggggatgcggggccctggaggcctccctctagctggcctcaggacccagatgggggacaggcggagtgtcagtatcaagaaaagatgtccctgggaggaagggctgagtcttgacttcttaaagaggcactgcccagctaaacacttgggggtctgatgagtctccaggtcggactccctccccgccattgtgtcactgccaggggcacagataagcatcccccccgccccagtttggggaattttccaacacctcatggggagaaaaacaaggaaaaaccaacaagtgcaggtggaaattattccatggtgctgctgacaacagtgggagggagacagtgcagctgacggggacctcaccctccaccagccttgaggacagggtgggtgggagctgacagtaatgttcgcctggatccaaatcaaagcctggaacgaccaagtaaccggcctgctgggtctgaaccacagccctctggccgcctttggccccactgagcccccgtgtcacagtgtcactgaagcgccttcccttgacgggtctgtgtttccaaatgaaaggtgtcagcaggaaagttcctggtgccttcagagtcgaccggttcaaggccagctcacgaatccactgtggagacttgcattggtgaggtctgtatgcacttaggaggcacgctgggctgtgaggcctgggagagctctcctgaaaggggactccgcagctccctctgtgtctgctgtcttagccctggacggggccaccttctagttctcgtatctgggtgggtcacacgggccagaatctggatgtctgtggccgatgcaaaaccaatagtggctgggaaacacactggctctgatttctgcttccctctggcattaccatggaaccgagacaccgtaggggcatgacaccaccctagccgaggcctgcccactcaggatggggttcattttcagaagcaaataagtggttcatttcagcagcctcttggaaatccgcagtttagacagctcggcacgctgggcgatgggatggccccgggaggcgcccggcacctgtcctcactggcgctccaaggtgtctgatggcacttccaccccaccatgtgcaggacatgcctagccacttcccattcattcatttaccgacaatgaaattgtatccaactccttcaataattcgaagcacggcctagctgatctggtatttgcactactcttaatgcgaacttccaaaagaaccgttccgctaacctagaaatgccacttcctaatacacacatttgcctgagacagaaaggcctgcttttaaagaaataccagagagggaagaggtttcccgggaacagccacacacgcaaataacccattgatggaaatttggggtttgtaaattagagggttctggagaggcaccgccggggcaccacctccacaagtgaggtgcgggtgacctgggcccccctgactgccagcatggactgggctgctcctgcacaggtaaaaacatgccctgaacagcagtctcagaacgtccacgctgaaagagtcacgctgccaatctgccgggcagtcagacagccctcttggcatttgctcagggaagtggaatcattcaaaccagaggaagcagctgtgccctcttctaagttagcacaaatagtcaagatccagtgaacccagaaaccaccagctgatcggctgagcccccgaatgccgtgaacatggagagacgtcatcttgagtccccagaggagagctggttatggatgattttagacaatgatacgacccaaggggacaaacaaaaacaattaagggtcctgtcttcactcaacccatcccttcagagtggctgaagtacactatctgatcatttcctctggaaaaaaactggggtatttgcagtgggaaaagtgattttaaacagaaaacaggccgggcacaggggctcatgcctgtaatcccaacactttgggagcctgaggcagaaggatcatttgagcccagagttcaaagaccagactgggtagtaaagtgagaccttgtctctatcagaacattttaaaattagccagatgtggtggtgcgcgcctgaggtcccagctacgtgggaggctgaggtgggacgattgcttgagcccaggaggtcaaggctgcagtgaagctgtgactgcaccactgcattctagcctgggcaacagagcgagactcatctccaaatatgtaaaaaccaaaaacttagggaaaaaaaaaaaaaaaacagaaaacaacagggctgcatccaggcctgggtggaatttgctttcccaccaggagatgagggtgataaaatggctggcgctattttaaaactgaagttaacaattgttctggaactaccagaaatgctaagccaaatgataccttgaaaccttgggtgttttttttttttttatgcttttcgaaaaaacgagccctttgcgggttggggtcacaggaaatagaattatgaatttcagaaagagaacagtcatttcttcaagctgccgttcaccccacttacctaactcttccctacccaagacagagtacctgagtcatgtgtgaagagttctgttttttttaaatcagcgtttaatatttttccaccagaaaataaatgaagggctattcaagaaactctagataaagcaggttttgtttctggcttttattaacaatgtcaccattttgtatagacccccagtgcgcatctagggtcaacaaaatcaaactcactgccgttgtaaaatatttataggtcaccaagagccagaaacaggtcagggtcttgggcgatttaaataagccacatgggccagtcacgtgtaaccccagtacttcaaggtgggaggatcgcttgaggccaggagttccagaccagcccaggcaacacagcaagaccctacctctacaaaaaaaaaaaattaaacattagccttgcgtggtgttgcacgcctgtcgtcccagctactcaggaggccaagacaggaggatcgcttgagcccaggaattcgaggttacaagtgagctctgatcgcgccaatgcagaccaggctgggcaacacagcgagaccctgtcactaaaataaataaattgacaaataagccataggatagctgtgcacggtagagattatcaagacggctcagaaacaaatcgggtgctttctgtgcattgacatggcagggctgtgttcaaagagccatcccaggagtcgaagcatctataaataacacatctcacacctaatgatgaaggaactaacaagcccaaaggaagaaagcgagggcatcacacatagtgaaaccaattctgggaagacaacacctgaagctttcagagaacaagattttcatgtatcaaggaagctgctaaaaactccttgaagcgacggcatgttacaatctggaatattttttcacacagagaaaaacaaagccaggctttcgaaatcccgagatttgcttccgaaaaggcacttaactttgctcaacagttttttggagctctttttgttttggctttcagagtggctgttctagactggatttcttttttcattggagctggtaactgaaatttaaaagctttaaaaaaaaaaaacttcaaattgctcttccctggcgcgatctgcctgaagtccttcaatttgcacttgtggcacaaaatgcatggggcgggactgtgagaacttgtgcacaaagggctttttggggacagcagaaccctaatgtaactttcgcaatcttcttttcatacttcggaagtgtttgacatcttggcttccaaaaaccagtgaacacaacagcctcggtgcgtcagaaataatacaatgaatctaccgtgaaggacagataggtcccgcctccctgctggaagaaaacgtgcccttatgatagagcatccaaactgcggctctttttttttttattgagaaactgtttttcttacagaagtggcagtgtagaataaataacgcgagggacagagagtgtgaggtaccaagaggctaaagaagctgggaggtttgcctttaaaaggagacaaaaatcccagggaagctgcaagcggaagggagtggggtggcccggaggcggaggactcaacttacagaggtgaagtctgcaaagcccgaggcagaggccttagaaggtttagctgcagaggaggggacaaatgggtcttttccactaaacgggtccccaaacccctttttactttggaacgggtcgccgctgtcagccccgagtggctggaatggatcgggggcctcgggaaagtctgcggaaccaagctggcttacaggtgtacttttacctggaaagtttaggagaaaaaaaaaaggagaaagaaagaaatatgagttactcacccggacagagcagaatgctggtgggcacaagcccggggcgcttctctgagaaaagcttgtaacttggctaacaggctggacgggggtaccctggggaatcccagttttaatcagctttatcccaggggcttaacgggttgtgaacaacacaggaaaaacacttcagatgactcccatacacaacgcacacagagcagctaaaacttgagttgtcctagaatagtttgcatgcaggtacgtttcaaacagattcattttagcatggcaacacatttattaacatactaatttaaaaaatcatggctgagcagaaaaatacactgcaagcttctaacagtaaaaaaaaaaaaaggcagaggggagagttacttgcaaatgaaaaggaggaattagtttcacaacgtggtatggttattcggtgtgttagttataagggtctgcacacagctctgccatgctgaggtttaagttcttttttttttttttttttttttttttttcagagacagagtcttgctctgtcacctgggctgaaatgcagtggtgcaatcatggcttattgcggccttggcctccagggctcaagcgatcctcccacctcagcctcctacaggcatgagccaccatgcgtggctaatttttgtatttttagtagagatgggattttgccatgttgcccaggctagcctcaaactcctgccctcaagtcatctgcccgcctcagcctcccaaagtgctgggattacaggcatgagccactgcacctggccttaagttcttttttagcccccacttctgtccctctggtgttggtggctccaaggggcagcgtttatctgggcctttctgggcttctgccaagcagggaactccaggatgcccggtcccagcaaggtatatcttgacagggaggtgagagagaagtgttcagaaatggaggaaaatgacactgtgtgggggacatggcctgaggatggtagcttttcccagtgcatcctgccaatgtaccagaacattccaccaagaagcagaggcctgttaagatctgcttggtgacgggaggtcccacctgacgggccttccagcatctgcagtttgcaggccagccgggctgactccatgctcctgacacccctctatctgcccaacggagtccctgggcattcaacgtggtccacgcagcaccccagactggaagctcaataatatgcaacacgattccggcgtgttaactctggaagtttcgaagctaatgtttagaaaaaaccaggaactgcctgtccctccagggttgaccttggatctctggctgcacctccagagagcaccctggctcccagccacacctgccccgcccaccacctgagcctgggacacctgccttcctcatccggtagaacgagcccacacaggccagcctcggtccctctccatgcccagatctaaagcctttccctctgttcccccagcagatcagccatcccaggcctcatttttgaggccccaggtgtccttgtgggctccggggctacagcccccatctgccacctttagctctgggcctcggcaagggaaagtgcctcctcccagctggcctccgtttccttatctgtgaagtggaaatgagaaggagggcgccaaacaaggtgacattcctggggtccaggagtctcctcccactcagtgtcctgcaccgccgtgcccagcataggccagtgagaacctggcccgtagcccccccttgcctgtagccctacttctggaaatggaaattcacttttctctcaaccggcagttctgggccagcataaggactgctgctttctttttgcatattcaaggaaaaacagtcttccttcccacggtttgcacagaaggactcggagacaaactcccctgcagcccacccttgcggcctgcctgtccgcctctgcccgtcccacagggttccaccggggtcgccgttgcatccttagctgacctctggccaccagctgcgggagatccttccagactccttgtctgtgtgagtccatctaagaggctcctcctcagggttggagggcgagctgtcctgggctctattaggactcacatggatgagaaagaggggaggtcgaggcctggtatcagtctcctcctgtggcctcaaatcaattcactgtcagacccaaggcccagttagcagagggggccctgcaatctggaaggggcctatctttgccaaaacttgtgggcaagccatgctggagacccttccctagaggggcagtgcccagcccacgcgggcaggacaggaatgtggcccctctccttccgacagcgcctgccctctcagggcagtccccacacccgagctttctaggtgtctccctttttctatccccagatgtccctcccaccttcagctctactgcggcctcctcctaccccgacctccccggggctgcagagagcagggtgatctggcccagcccgcagaccccgggctggttccgctggccttgaggaactgcctcacacccccaccttgagacggcctcccatgcagggccactcctggtcccaggcatgagccaatggtaagccaaggcctcgctgccaggtctcccggagttgccccgttccctctcctaagggacgggcaggcagctctggcgggcgggggtcaagtgaggcctgcccagcctcctgtgagccccaggctgtccactggagcagaaggggctccctagggctcctgagcaggatggagggtgggcgagggcccctcacctccaccctcccgtccctagaagcctcatctccctatcggccgcccaccagctcggctcccttccctgtgagccaaacccacccagcaaagtggcctcaacacaggtgggccccagcaccctgcccagactgcttgagggcttctcccgcttggggatgacaccccagtcttgtccaggtggcacctccttccccaggaacccccaaacccagggcttctttcctggctatgccttgtccctctgcctggaaggcactcccaactggaatgccatcacaggcagtggccttctcagggaagaaatggcagccccttccccatcatgcctgtgttcagctctgcagccaagccctggggctgggagtggccctggaagacggtgtggggcatggcggccacccccctcagcctgtttcttaatccaaacaaagggctgtgtccccccaacaattgttcatacgttcaagtcctaacccctgtgccttagaatataaccatacttgaagatagcatatttaaaggggtaactgagttaaaacgaagtcaaaggatcaatgactgtcttcactgaaagaacttaggacacagatctacacacagaacagcaatgtgaagatgcaccaggccaaggagaggtctcagaagaaaccaaccccactggcgccttgatcttggactttgagcctctagaactgcgggacaatccatgtctgctgtttaggctgagatagagcaagtgtgagcagggagccaccaaagccaccggcaggggcaccctgggggacagtgtgacagtgtcctgcaccccagcctgtgggtttgcaggggatagggacagtgacctcagccagtccctcgagcccctgcctgcttctgcccagcttctccctccacgggaaagccccccctcccccagggtccctcaccactctgcttcccgtggcactggcctctggcacggctgagggtcagctctgtgaaaagcgggcccagcataccacaaatgccagccaatactgccccatgtccctggtgccctccagcccagggctcggcacacagtgggcttcaggaggtcctggtgaaccaggtgccacctgttacagattccacgggtctccagggacctggggccctttggagcaacaccctggggagcgagaagggaataaaggcatctgcccttcctggtttgcaggaaacagcaatgttactgtgcatgcttgggtatttgatttttcctcgaatacctatgtgatatggatcaaatagcaagattctagcagaggaaacagttaagtgtttccaggggagaagctcaaagtcccaggacacggtgtagccccctgggacgggcagcaagtccagggtggacactgcttgatttctcgaagccgttcctgcagggagtgatcacctgaggcagatttgcaagaatgtggagggaggtgtaaagggaggacgccccagccaggcccccaagagcgactgccacggtacagaaggttcaaataaatcagtcatttttgagctgcttttcttcttcttttcaatgaagatcttcctcccttggtttggggggtttaaaaaaaagaaattggtttttgggaggagcggttaagaattctgcctgctaccatttcaagctgaggtttctgatgcgcaaagagatgttcagagagatgaaaagcttcgttcacaccaagaactgcctgtgcctggttttgctctgttgccgaaaccgttgttatttagaaatcatgactatggtaatatgaaaccagggcacatcaactgctggcctcttgttttcagaaggaacatcaacaacaacaacggtttttttctcagttgttagtgtttgtgctttggtaagagaggagattttggacctgacacgtgtgaggtcagccgagtgcccggtccagctctcgaccttgctaatgaccagacgctttgagcaaagaaagcccccggcatcactgtagggccacggccctcagcccaaacttcccacttttgctcagcgatttatttttagcggctgtatttttcaaaccttctaggtctagttcctgcttttatgtaaccacttctgctaactccttaatcgttttttccgattttgtgaggtatagcttatctcaaacgtgacaaagtaactttaatctgcctccaggccctgaagcaaaagctgccacgcgcacccacgccagggttttatacttttttatggctccagaaaacatgagtaaggagagagctttactgacgcgcatttcagaaaaggggatggaaatcatgaaaacaaaacccaaaaaagtgggtatagaaacatctgggaatgatggcatcaaaccaggtgccaggcatcatcctggcacctggttcgatgccatcaatcctagatatttgcagcgggaactaccggggaccacagcagacggcagtgaataaagacaaatgaaattaaagaccctcttgggtgtgctgactgcctaccgcagggagacttcattaacagggggcaagggatacaagactgaagaaaacacaaaatagaacttattttcaaaccacagcagtttcaacagttacccaagcggtgtaccgaaaccacacacaggactgactttagcaaaaacaatatgaaccaaatggtttaccacagtatgtgctgttaaaaaaaaaaaaaaaaaaaaaaaaaaaaacttggtggccggctccaccctgatagaaatttctttaattctcctatttctcaagcttcttctcgaggctgcgcacgcccctagcacccgggatcggggctgtgatggggctggctctgctgcactagcgttcttggtcagcaaagtttttcaaggttctgacttttctatcttgctttgcaggaagccctccgcttaaaagcatcctcaagagctgggtgcaaagcaaaaaaaaaaaaaaaaaaacccaaaaaacaacaaacaaacaaaaaattgaatagaaatatacaattgcaaaccataaaaacggtgaatgctataaaaaccttggaaaggaaactctcttggtttaaattttttgcttaggaggagcataaaaggttcaggtgaggtatggtctcaatcaatccgattaataaaaatattagtaataaacatgagagtgagagagagagagagtgtgtgtgtgtgtgtgtgtgtttgatcctggctaggttctgtttatacagttcagttcagtgctgtacttggaaaatgcagttctgcagatgagagatacatacaaaaacaaaaagaaaacaaaaaaatacaaaacaagggtttgtggtcagggaagctgcccaccttcgctattatcctatacaacacagaacgatcacacaactctcactcatcctacacaactgtggacacacatacacaaccatcattgatcctacacaatgggacacacacacacaagcatcactgatcctacacaacagtggacgcacacatacaaccatcattgatcctacacaacaggggacacacatgcacaagcatcattgatcctacacaacaggagatggctacacaactgtcattcatcctgcacaatatggacactcacacaactcccattcatcctacacaacagaggatgcccacacaattgtcattcatcctgcagaacacagacacccacacaactgtcattcaccctacacaacaggtgatcccacacatctctcgttcatcctgcacaacatgcacacccacacaactgttattcattccacacaacaggtggtgcccacacaaccatcattcaccctacacaacacaggcacccacctgtcattcaccctacacaacaggcgatctcacaaaaccatcattcaccctacataacacagacacccacctaactgtcattcaccctacacaacaggtgatcccacaaaaccatcattcaccctacacaacacagacacctatgcaactgtcattcaccctacacaacaggtgatcccacacaaccacaactgtcattcatcctacacaacacagatgcccatacaactgccaggtttctgagagtcacgctgcctaggagagcagtggcccgggcggggcaccactccagcagagctcatccaaggccactgacatgtcttattccaccctccccatcctgccagaaaaaaagcttagctgcggggagaggggagaaagaaaacagtataggttctaaaattcatcactgctcggggacttgtcttgaaagagtgcttttccccaacacacgtcaacgtcttcctctggctcccatctaagacacatgaggggagtttgttttttacaatgtgacacacgggaccacgtaagggacctgcaggctgggagtcctgcaggcaccagccccgcgcgcactctgccttagatcaaagctgtgtcaagcagcacagccccgggagataagaatctgaggtccctgcgatcgcagcgttgagattttccactaaaaatatttaccgaattttgagaaaatctgcttcatgcattgaagggaacaggatgaggtttggttctgaactgttgagaaaagctgaacaaatatttactacgagccactgctggccgctgtgttttcctgccctgtgaggtgtgtgaggtgggcagggggctgttgaacccaatggctgtggcctcatcttgccattaaaagaagaaagtggggaaaaggtgctgtgccttggggtcctcaaaaggcaaatatcatttgaagtgagaaataacaattttctagaggtcaccacaaaaggctcccatgacatttacataaaacctgccaggcaagggctgcaccagccctggaagaaaaaaaagtgtgtgtgtgtgtgtgtgtgtgtgtgtgtgtagggtggggtatgtgatttggaaatgaatttacaaatcacaagccagtcttcatgacaaaaataatacagactggcaggtgtcacaattctggcttctttgaaaattcgcatttgttctctggcgggcacctttgacataccctgcgtgaacacccctgggtgtcagccccatcctctggggggatttccagggagagatgctatctatgcatgagccaggcacggggagccctgacagggcaagggggcccagctttgttcctccctacggagtgtgccaatgtcgcagacgccacctctgcaaagggtaggaaggcgccttgcccacatgtaacaagatccctgagaacgccgtgcagcgagtctgaaagctggttaggggtcgtgcatgaaaggacccaaaagagcccctgggaggggagcaagtgaggcgcagagcccaccaggagctcccatggtgggggacacttttgctctctttatggccagattccccattgcccgagtgcatgtgatattttgcagttagcagtggcaggcaaggggcgcgctgactcagggctttgaataggagagatgaaagatgaggggccatgttcaccccgccagaaaagcagggaggcggtgcccagagctgcacccagagcccccttctgaggcgtctgccccagccctcacctccctcaggtgccaagcaaggggttgaggtgtcctggaggcaggtacacccgatgtccccagggcgatggctcccgtctgttcacacctatactcagatgctggggtgggagcccagccactctaggcctgcaccccaccctgcagccccccaggcctcagcatttgcaccccactgaacaccagatgataatcgagtcacacgacactccctggatccgcctctgggtacagtgtgcccaggaaggcaaatgcttctattttcaaactcagtggtctttacagaacagaaagtgctccaaacggcaatctgcctgcagtcagtttaaacatacaaggctgacattcctccctctcagagtgggaccgttccttggcaccgtcagcaggtcccacccagccctaagacagaccttccagagggctcagacggaagctctgaagcttccttgaacacagcagtgctgggggatggggggcgtgggcaggaaagagggactccacctggttggccgttttaggctccttgggaccccctccccatcctggctggcaggcaagtgccagaattttccaggccccttgagatggtggaaccacttgtcccattgtagaatttcacatgtacccaccggattatctctctgagatcatcgtgggaacgaaattgaagtagttaagttcaaggctgaggtgctaaccgcagggttcaaatggagatgccatttttaaagtggatcttgtgcaatcaacaaaaggttttgggacccacatgggcacatgatggggagaggtcactgagccctggtttcgatgttggcctggcatttcagagaagtgggagagctggcagcacttaggacctcagggcttcctcggtggctgcatcctgtgtggcacccccggcagggaggtcaagaactcacggccaccctgggtggatgccacacacaggtacgggaggggcttgtttgcaaggggaagaatgacttttgtcttcttcttttgttgagagagctgctcaaatcaaacaggacagccgctggttaaacttaggtaaaagctgttcgttagtgcaactgtggggagggggcgaaaagacatgctcatcaccatcacctatgcggctttgtttaggaggtgaaaaggtcattagcagtaataaaataatcattaaattggggagaggttaaaggtgactggctggttagcggtagaactgcgctggctggtgtcaccgggcgctgcaggcaggaaccgcaacgcagggccgcgctggcaggaagtggcaagggtggggccggtcgcaggatcccactatcgcagcagggctgaggcccaatcactgacacccacacagccgtttcctgcacttaaaaaaaaaatctgtttctctctttgcaaatcaacaacttttacctagaaactcttcagcggtgagctctgactgatcttgatctccggtccgttgcagaaaatataccattgtttacctgggggaggtgtgtgccacggctaactttaacctaactctaactgacaggtttcggcagcctgccgggtctgtgctgcatctgcctgaaagaaaccagtttcttctgcccaaaacagacacctgctggttatttaataccttgatacacctttcttgaaaagacctccaggcaagaagaacttagtgcccacaccaaagctccatgcatgccccaggagatggcccttggtggtccccagagtgcactttctggcttagatggagacagaactgagtatgtggccttgagggcagatggccaactgtgggctactcagctgtacgctgtgaccggaactctccctcgaggaacctctgcaggttcccaggtggaggggtccacctgtgactgtccaggtcaacacctgtctgcccgtgcacccacactgcatgccagccacaccaaatgtcaatttcacctcaattgacctttaaacaaaataagacaagcagctcccacggaatttgaaaactgcagcctctagaacacaagagatggcaccaaagccacacgtgactcagacccaaactcacatttggtcctgtatgagcgatgacccacagaggacgctggagccctctttgaagttcaactccctgcacgctttttttaacggaaaagatttccactaaactgtgacctcacagggagaaaagggcccaattaatgactcccagaatgtgtgcagccacctcagctgcccagcctgtctttcctggaaaaggtgcccatatggcagaagcctgcgtcccggtccctgtgccgcagggtggggatgggggctacagaccacatacagcacgtcaccgtgcaaggcgcttcacccacacacccacctgctaggcctgagtgggtcccatggtcaggcaggaaaactgaggctcagggaggttaagtgacccacccggggcctccctttcctccaatgtccagaaaccagcctgatcaagcagtcccctggattctagcagaattggctgcccagaggacagaaggaagcggcctcagttctcctgtcctggcctcacacatcagccatttcctggcacagaggcctagcagggttctagaaacctctgggtgccctgggatggacaaaccctggatgggagcatgggacatcagacatgttccatgtgccaggcggagagatgacagaaaagcttgttccttcattgtgatttccatgagtgcaggtgtcaacgctgtgtgcatgtttaagactgcccactggacagcctatgggtccttcagactttttgtcagtctgtctatctccaccagctcaaggctcgaccgccaggctcacagggggtcgcatttcaccttcctcctcactcagccacgctgggacccacgcatctcgcgcaaagccccagcatctgggaagccctggggtggccaggggaaggcggccgtcactgtgtgctggccgtgtggtctccctgagcagaaaaagcctggggtagcaagaaaggcagaaaggctttttttggtttgtttgtttgttttaagaaaacataaagtccagcagtttgaaaacgttggactttatgcttaaaaaaaaaaaaaaaaattcacagattagcttcactatcttctgtcttaaagaagccaagaaaacaagagatctgccttgtgtcttcctggcgaactttctgagcacgacttcacccgacactcatctgctgaccgctcttgcccataaccagaggcctcctgggctgcacgtgggtctgtgccgtgtggccaggaaccgggaagggaattgtacagagcccggctctgattcccttgaccagagagcaagggtagggcaagcatcttcctttgcaattccccaaagagccaaacacttctccccaacatgtgactcaccaaaggtcaaccactgggtcaactcagtgtttggactgttagaggttagtacggaatcacagcacaaataatgctgcaagctcaaacggcaaccaccacacggtctgtacctaccacccagcagcgagtacaatgcagaatttttctgttcagccattgcttctgggtaaaagaatcaaatgagaaatatttaggcctccacacagatctgcagttgctccggacttaaaatgctgcgcgtgcattggctgttttagagaatgttctgaagctcatggcttggttctcgttactcctgtcttggggcaggaggcaggtcactgggtgtagacctggccctgctgccaccttgctgtgtgaccttggggagcccccatgacctccctccccgcctttcctcttccaggaaatgggcatggcctggcctgtctccctcacgggtcttgctgggacctagtgagataagaactgttcaagcacttcctaagggcccatcaatgttaatatatttctgcagagcaccgagtggcacagcaaccatcaaccacagcagaacaaagatgcagtggcctgtgccacgagtaaaggagcccaggaccccctgggtctcaaattgtgcaacagctccctaaaaagcctgaaccctgaagccaggcccaaggaagtcacccaaactcccgttatcaaacgttctacttttaacaagcattcttttctgctttcgaagcccacagtacactaacagcagaagccaaggtggggtgggtaggcttgcagagggagacacgatgggaggtgataactgagggaaagttcaaaagcagacccagcgccgggtttaggtacgtggggaggcgggggtggcggtttccatgaaacactgaaaatgaagctttgcacctgtgagctgttgagtgggatggctcctcctcagggcccagcaaatacggcactgctcggcaagtgtgtgcacccatatgagaatacgtgcacatgtgtgtaaatgtgtgtacacgtatgtaagcacagagtgtgcatgcccgggtgtgtatgagcacacacgcacgcatatgtgtgtgcacgtttgcatgcatgcattatgcaatatctgtgtaatgctcacctgtattcatgtatatgttcacatgtgaatatgtgcatgtctcaatgaatgcatgcacatatataagcatggagggtgtgcatgcccagctgttatctatgagagcatgtgtgtgtgcaggcatgcacaatgcagtatgtgagtgcatgctgctcatctctatgcatgcatgtgtgtactgacaagagaatatgcacacatgtccacagatgcatataagcatggagagtgtgcacggaggggtgcatgggagagtgcgtgtgtgcctgcatatgcgtacatgcaggcacatgcgagaatactcatgtgatgcagtatgtatgtgaatgcatgctcacctgtatgcatgtgtgttcatgtgcaaacaggtgcatgcatgcatgtgtctgcaggcgtggaggatgtgtgtacacagggtacacatgtgcatgcaagagcatacacgtgtacgtgcacatacatgcataaaaatacatggccgcacgtgggaatgtgcacatgcatgtgtgccagctgtgtgcatgcattgtgattatgcatatatgtgtgtgtgtgtgtgtgtgtgtgtgtgcttctgctcccatcttttaggcagagtgaagaggcccactgccgttccatcaggaagccaacaaggatccctgaagagccactgcctctgtgtaaggcacaggtggcctcttgcagatggaagggagtccctttgttgttttgtttttcctcctgatggtaaatgtctttgatgtgtggcttacagaaatgatctctttacgcatctgtatctgctcaacagttcacagaaaatctgctctaaatccacacagcccatacttggtcatactttttctcctgactcatccacaagaaagccaacctgggcactgcgggctgggtccccatcctcctgagagaaggccatggccagcccaggggacaggaggagagaggcggtgttctaaaaataacttcccctatgttcacctctactgacaggtggccgaggtgcaggaccgagggtcactcgtaactagtgagctgggggcatgcggagcctgctaggtccattccaggacctgcgatgacacaggggctgcaaagtgaggccagtggcagattccaggggaggggcacgtgtaggcaggagggtgagcaccacttccctcgctggagctgatggaaagggctcgggggcatgccctatctagggaagacaggtaacagaaggcatgatcctgggagtgcgtgggtctcctgtggctgcccacaattcagggacagtgtggggaacagtctgcctggaggttagagaataggaggcgtcccagaccggggcacagatggaacaggcaatgaccgggtagataaatggatcagggagctgcagtgactccttctgccacttgaagcaatagctttctgtttgagagtctggccaactggccgccggcctaactctgtcatacgagagaaatcccacgtgtgagttaaagggcttcagaatcctcaggggaccctcgagggccaaggctaggagacattggcagcactggccatggggaagaggggcagggcctgtaggaagtcccctcctcagagctgtgcgttgagatgcctgggcaagctggggcagaggggagccccgagccatcctgcctcctcacatcagatgccaccaaggacaatctcccgctccctccactctcagtcctgaagcagctgggaagggactggaccaagcagcgactcctgccaccctcacccccaacaggccctccctgagcacggacagggagaaggacggaagagaaggggccagagtggccacagggctgccggccatgagtggctcctgaagtatagccagggcgtcggggtggcactgacatgctcaggcggaggccgcacgaagcgcccccagccacaaggggagctctaaggccaaggctttgtgcactccaatacagagccagaagcccaggggcccacaggacggggcgagggcgggcaggcaggaggcacacaccacgcacatacggcacttgcgtggacctgggcagctgggccggggggaccctcttgctccccacacagggtcccacggcatctgctgctactctgggctggtgagcagggaggccctggtcccccgccatccggcaccggtaggcggtggctgcgagagaagaaagcttactgaccgctgggcggtttaggccgtggaggagcaggtttcttcggaggcagagcaggagtgtcctgtttacttttaaaggggtcatctgagaatcctgcccctcccaaggaggaggtgaaagggccagaaggtgggggctgtaagagaggacatgaaagagaggcaaaaatagttgttaaaacaaaggtgacggatgtccactgaacagacgctcatgctccaagggccctggcaaggcctcctaccctctggactgcacaacatggccctgcttggacgtggggtctctttcaagccccatgctttcctccaccctcaacagcaggggccctctggcctgtgggtgatgagctgcccaacatagggtggcagagagcagtcccatacctccacgggcttctagcaccaagggcatccccagtcacacgaggcacactgggtctttcctgactccaggacttggcacatagggtcccttgggcctcctgcttacacttcagagacacgccccaccctcacctgtatgctggctgtggtgcttggcacatgccctggtgtgccgcctccccactgagctggccggtgtggtcactgccttcagttagtgatggacagctccaggtgctgggtcagctggcaccagactttcttcctccatgcctctgggctgcacatgcagcacctcaggtggaagtgcatcctcacatgcccggccacccgcactggtcagcatgcccacgccacctccactgggctctgaccacctctggcccggaccctcggtcagcctccatcacacccatccacatcctccaccccacacctgctgtctcaaacccaaatcggaccatatcctccagcttaaagagagagacagtcagagatagttataacaattggatagatgaatggatggtgggtgggcagatggatggaatggtagttggatgaatggatagacatatatgtggattaatggacgaatgaatggcgggtgggtggatggatggatggatgggcaggtagagacagggaggcgggtgggtggtagacagggaggcagatatgtggcgacgtcttgcaggtaggtaggtaggtaggcacttcctatagggaagctccaagctctcattaaggcatgcagggacttcatcgctgccccagctgcctgatttttcaggctcacctctgaagtcacccctcccctcacaatgcctccttagtccccagaacccactgaccccccagccgctgactcagcctcctgtttccaagtcctgcaacactcaggtctcctgctggggaactcggcccacctcgtccaccaggaacccctctccttgctcagagcctggctggaccccactgccgtcccccagagctctcccagggctctccctggggctgcttcctgccacccacgcctgcactgctcactgagccacagagacacgcttccaggcctctcccacctggagggcaagcacagtcctctccccggcacctgctgcctccaggcctgtgatgagcagatactaagcgccgccacctggggggatgcttgtccctcacttggagcgccggtgaggcacaggggagccagggtctccatcagccacagaagggccagcatatctcaggcgtctgagggaaggggctggggtgtcccaggagggagaaaatcactttctatgggcagaagaaggatgagtaaccactcttactaaaacagaaaataattaagtctgtaataaaatagaaaataactacatttttactaacagaggaaacacattgttacaaaaatgcaaaataactaggaaattataggacaaagagataacactgcgacaggaaacaaaaggaatgggcagaaataggggtaaaaatgatcatgtgttcctggccgggcgcactggctcacgcctgtaatcccagcactttgggaggccgaggcgggcagatcacgaggttaggagatcaagaccagcccagctaatacggtgaaaaaccccatctctactaaaaatacaaaaaattagccggtcgtggtggcgggcgcctgtagtcccaactactcgggaggctgaggcaggagaatggcgtgaacctgggaggcggagcttgcagtgagctgagatcccgccacagcagcactcctgggcaacagagcgagactccatctcaaaaaataaaaaaaattaaaaaagatcatgtgttcctccaagagcatagaagagaaagatcagagtggggcagaggtggagggaggggccgggggtctttaactttctccccagcagggaaggcctagagacagagaacaggtcaagagtacaaaggcacactcccagggtttccctcgagaatctgaatgcaacagattgcagatgtgggggaaaaggtctaccaccacgtccagcagacagtcttagaggtatggctgcctctgcctccagcatctagtcacaccgatgcagctgactaaggctccagcgtctagtcacactgacacggccatctaggccttcagtgtctagtcacacagacaaggccatctaaggctccagcgtttagtcacaccaatgcaaccatctaaggctccagcgtctagtcacacagacgtggccgtctaaggctacagtgtccagtcacaccagtgcagaggtctaaggctccagtatctagtcacacagatgtggccatctgaggctccagcatctagtcacacaaaagtggctgtctaagactgtagactagccacaccaatgcagccatctaaggctccagcacctagtcacacagacacggccatctaagactccagtgtctagtcacatagacgcggctgtctgaggctctagcttccagtcacaccaatgcagctgtctaaagctccagcatctagtcacactgatgcagccagctaaagctccagtgtctagtcacacagatgcggctgccaaaggctctggcatctggttacacagatgcggccgtctaaggctccggcatctagtcgcacagacgcagccatctaaggctccagcatctagtcacacagacgtggccgtgtaaggctccagcatctagtcacaccaaagcggccatctaaggctccagtgtctagttacagcaatgcagccatctaaggctccagcatctagccacacagacacggccacctaaggctctggcgtctaatcacacagacgtggtcatttaaggctctagcgtctagtcacacagacacagccgtctaagattttagtgtccagtcatgcagatgcagccgtctaggcttctagcgtttactcataccaatgcagccgtctaaggctctagtgtctagtcacacagacatggccctctaaggttccagggtctactcacacacacgcagccatctaaggctctagcgtccagtcacaccgacgtggccatctaaggctccagggtctagtcacacagacgcagccatctaaggctctagtcacactgacacagtcacactgacacatccagtcacactgacacagctatttgaggctctagcttccagtcacaccgatgcggtcgtctgaggctctggcatctagtcacacagatgcgactctctaggtctctacaatttagttgcacagacatggccgtttaggcctctggagtctagtcagagacgtggccacctgtgtctctggcagctagttatagagatgcagtcatctaggcctctagcatctagttacagagatgcatcgatctgggctatttgcgtcccgtcacagagatatggctgcctcggaccttgtgtagtcctagagtcgaggttgctcggcccagtcagagccacatcagagacagaacagggaggtggcccctctaagaggcagcctacccattccaggtccccccgataagggcagtggcaggtgcccccagggaggggaaggggccccaaaggctcctgcacagatgaccccaccagatcccttccctgggcttcacgccgccctctgaagctgcccaggcaggagacactcgctctgtgctgatcttctcacctaataataggcccagtgacctggcagggggtcccactgtcagcacctctgccttacacacaaggaaactgaggcacacaaaggaggcgcagcctgcccacatcacacagcaggtccacggcggatccagggctgccacatcgtctgcctcccaggctggggccaccagacgctgccctcagctgccgagggccaccccagtggtgggtccagggcctcgtcctgggcagactgtcctgcccaggctggaaccccaaccctgccacctactcaacaccctgtgccttggtttcttcatctgtaaaatggcaagagtgacagagctcggaaggctccggcaagaaggaaatgaggtgccatgtgacaggcatcagtccactcactggcactagataaagttggcacatggaccacacgacaatgatcacaccaagtacgaagctgcgattggaatctgggagtgcccccatctgctgccccagttgtccccaggcctgtccgagacatgaggggcagtgtcggcctgcagcttagctttaaaatgggccgtttagggtcggctgtttgggaaagaatgggggaaaaacactggcccgtctgtgggtgcttctgcgattcatggaacatgtccctgggcctagggcccgtgcgagtcccccgcggcctgggatggggagccaagcaggtctagatgggaagtggtgtgaccggctgggccttgtcctccctgggcatgtgctggcttctgggccacatctccagactcggagtggggcctcggttccagtggctgcagtgagcctttctaccctctgtgtcgcgcaataggacccgggcaataaaaccacactcagcctggacgtccaaagttgtaagacctggtgacacactcaaatcagagccgcctaaccctccaggctgaccggggacacctcgggccaagccggcttggcgcctcccatgtgtgtttaaacccacgaggccaattggcaactcgcgaggcgacaggctttcaataaacgcctggcactgcctccgcagtgaatcagatcactcctagctccagaatgcccgcgtcatttccgaatcccaattttcatgacttcaagtttcccaagaagcctccttggggactcaactctttcctactcgggcagcggcttcaaggaaaatctctatttttagaaaggtttcagtaaagctgtcaggggctctctgggctcggcaagagtgaagtgtgcttaaaataaaaggaagacagaaaaagctactatgaaaaccagctctaagagaaacacgtttgagttcaccagttgaagaactggttcaaaacagaagactgaatttgtaaacagcagccctaaatatcaatgcacagctttaaacaattgagaagttgctaaaaatgggctgacgactaacccagtatttcacagatggctttttttttttttcagggcagaagagggtgaaataagttggactcttgtttttattctcaaatgctccctggaaacatactttggggaatctgtttttaaagtgagcttatgtcacataggcttgatactgtctagaaaaatctcttcaggtgagggtggggcctcaactaagagtgcaggcccgaagagcctcccaaaggaaacttctagaatcaggctgtgggctgtgactctcctcagcaaagccacgcagaggtaaggtgcttcaattcagggacttacaaaagggcctccctgctctgctcagatggggaaaagttgatgatggtttttttttgttttttaaaaaaacaccttcttgccactttcatttcccttagcattttatttatatccacaatgttgttcttgaaaaacagataggtaaccaaaaaggaaaaacagagctgcaaggtcagggttgagctcagaatgcggctgtacaagtgtcatgaaggcagctgatggaacgctggaatcaaaacaagatagtattggagacccattttccacagctctgtccaactctgtcctggcccggcaccgccaataggaagtgagaccggctctgaaatcacagctgcatgtgtgtgaagagcccctggtttcagggcccaaggacaggcagagggcggtcattagatcccggccctagctcaggctctgctagctctccctccctctgctcacagtgagaggaggaagacagatccagcctcccaaaggaagaggagtccacttgcgacaaccagaaacgaccaggacgcctgagggactgctgccaccgtgtggccaacgttttctgctttcgggagatggtttcccgcctgcccaggagcctgtgcactgggccctaaatcttctgccagtcccaaaccgtgtcacagcgtggcatatgagggatggaggccttctccgtgtgctggaaggaggggggcgccatgccagggcctctgggctccctctgcccaggctcatctgtgtaaacacacaccctgcctcggtcagaagtgggatctgctgcgccgccagggcacgcacacacgcgtctttgaaaacctgaacagaatctcaagtgcttctcggaatctgtgttctgtgatcacaagttgcgaccgctgccaaccccaagatgctcagagactcatctgctccaccagctgagtgaacacggggcagccaagggagactgcccagtcacactggcacctggggcacctgggcatggggccggtggggccccgagggggcctcatgcctggggcacgcgtcttccaggtactcccggggctccctcccctcaccaccttcaggctgacagcagcgctcacagggactgggcccagctgctccaggggaccccccacaccggccaccccttaccacctgggccatgggctccaggaggggggctgtgttctgcttgtggctactgcctcttcccgcagcgtggataatgcctgggcctctgcaggtggaactcgtgaggaaagcaggcccctgcagccccccgaagacagagcccatctgcccctgcctgggggctgccgagaagggacagagtggacgcaggtgtcagggacgggacacacctcatctgctttccttcattcctgccaaagaaaaatgctcctcactcaaacagggaaacatacaactcacaaggaagcacaatggtgccgcagccctgtccttcccactcaccacagcccccatttccaactttccagcagtttcttccggaaggcacctcagtcgtaaggggcttctattgttgttttttgacttgtccattctggatgttccctgttgaattctctatgctaccttaaagatgagctccaaccacactgccagcgtctggagaagccctacagctgtctgggaccagagccacagtgagttcaggtcaccgtgtggtgagggccggacaccaacgggtccagtctggtaaccagcctcgctgctgtcctccttcaacagttcactcctcacctgtggatctgtctgcatttattcaaggaggccggccctcacttttcaacaccccttgagagttctgtcacatgggcgactctgaacactcgctggcccactttccctggacgcctcgcacctgcaggcctgctgcccatggccctctcgagacgcctgtgcccaacgccttctcaagtttctactcggccatggcaatgacttcaccgtctgagacctgatggtcgtcagacaccagtgggagccaggggagcccagggcacctatgccactgggaagggtcagggctcaccccacgggactgcagtgcattggatcacagccatggatgctttccagacctgaccttgtgttggaaaggtgccggggagatacatacgtgacatgaacaattacgcctggcagcccacaccatgacaagaggcacaaagacactagcagaggcgcgggggctccgtggaggggctttaccttggacatctggctgaagtcggcaaagccttcagcactattgaaggacccacttccgaagggatctaaggttccaaagggatctgcaatcggcaccaacaaagtcagagttacaggtctttaagagaacatgccttctggggtggaggggaaatgctagatggcccctgaaccaggagactcaggaaggctgcatttattcattagacacgtgtgtctgcatgaaggcctctcagcaaggcccccctgcccactctggcatggcaagacggtttctcactgtgacgaccactctgggagggccagcatcattcacggtcatcagaagagtgacaagttgccacagaggcgtggcccctgggtcccactgggtctcaatgggtcaggaggcgaggagcaactccagggcgacctgccacccacatgatttatacagggtggtgtctttggatagaggtttttgctgtgttttctcctctaacctggaagggatttgcctagagtactggatacactcgcctatgataccaaacactgctacccgccccacgcaagctgcaggaccaagcggggcctgttcccaaaagaaagggggtgtccacagatgctcccattgcataaaggctcgagcgtgcatctgcgagttctacactgtgagatgaggttccttcaaacacagaacccacaacataggccagtacctggggtcaaattctggatttcttttagggaaaaaacccaaagatacaaaccaaagatttataaggaggagtgagtaaacagtagttaatatcactggtgctattactgaattcctactgccaaaattcctttctggaaagatgccagcgcgtgcccaggaaggggagcagcagcgggtgcttgttttggcctaatgggctcaggccaggatctgggtgccactgactgatgacacaaacacagaggccacgctggctttgggagtgaaagtgttaactgcgggggagctctgctactgcccaaggaatagtcaggaagaaaaataagtcatgggtctcacctgatccttttgaggagacactggaggatgaaaagggatcactggattcaaaggggtcgagctaaatgaaaggagagaggaaagagtaaaaagcagttcgttggttccatcacccattcattcaaccagaccttcctgacgtcgatgtacaacatccagtgctgagccagagggaaagtggaatgattaaaactcaacccaggcagagtaaaatcccaacagatcaaccctcctgcagatagcacctatcaacctggacggaatatccccaaaattacaaatacaaaaagcagtggcctgaaggctgggaagtgaacaagacaggaagaagactttggaggagaatttgaatgtggcagaagaacatagcaggaggttgagtttccattccgccagctacagcaggaaggcacagtgagggtgcctaagattctggtagaatctgaccaccagaggatggagcccagagacaaccactcccaggggaaaggaaggggaatcgggatggaggggcagagatgcaaagatgcaagccctgaacttcatgatccactctcccccaagtctcaggctggcctctgcacacgcaagcctggggggactcgaggcagcctgtagctgaggccacaagaactgagctgggattggagcttctgccatctgctggtgagtgtctgcagtgtgagtggcaccaagttaactgcctgctgaaacaaatccattcctgctctttggagaaaacagactacagtctctacacagaacgctcaccatgtatcagatacatttctaaacatataaagaactggaaaaatgtgaccacctctcaccggaaaagacaatcagtgtagccaatctcaaaataacccagatggtggaactctgagacagggacaacgtaaaacggtgattataactgtgctgaatgaggaaaaggaaaatacacttaaaatgagtgaaaacacaggtgaccttagaagagaaatagaaaatatacgaaagaaacaaatgaaagttccggaactgaaaaagtgtatctacaataaaaacttcatcaccggggtcagtggatcacccaagatcaggagttcaagaccagcctggacaacatggcaaaaccctgtctctactaaaaatacaaaaattggccaggcgggcaaggcacagtagctcatgcctgtaatcccagcactgtgggggccaaggcaagtggatcacctgaggtcaggagtttgagaccagcctggtcaatatggtaaaacccatttctactaaaaatacaaaaaattagatgggcgtggtggtggatgcctgtaatcccagctacttgggaggccgaggcagaagaatcacttgaacccaggaggcagaggttgcagtgagccgagattatgccattgcactgcagcctgggcaacaagagtgaaactccgtttgaaaaataaataagccaggcttggtggtgcatgcctgtaatcccagctactcaggaggctaaggcagaagaatggcttgaacccaggaggtggaggttgcagtgagctgagatcatgccactgcactccagcctgggcgaaagagcgagactctgtctcaaacaaacaaaaaaaaaccccacttcattaggttagctaaataaccaagaataaaagaaagagtaagtgaagttgaaaacagagcagtagaaattactcaatctgaagaaaaaggagaaaaaagaatgaaaaataaataaataaatagagcctcaggaacctgtgggacaataacaaagggtctcatatccatgtaactggaatcccagaaagagaggggagagaaaattgggcagaaaaaacaaattaggagaactgacagctgaaagcttaccaaatttgttttgttgttttgagatgggagtctcactctgtcacccaggctggagcgcagtggtgcaatctcagctcactgcaacctctgactcccaggttcaagcgattctcctgcctcagcctcccaagtagctgggattacaagtgtgcaccaccacgcctggctaatttttgtattagtagagacggggtttcaccatgttggccaggctggtctcgaactcctggcctcaagtgatccgcccacctcagcctcccaaagtcctgggattataggaatgagccactgaaccggcaatgaaaacttatcaaatttgttgaaaagcataatttacagattcaagaagctgagcaaagcctaaacagtataaacaccaagaaaactacacccagaaacttcaaaaactactgaaaaccaaagataaagagagaatcttgaaagtagccagagaaaaaccacctattacatacaggataacaatgacctgaagaaatactcctctccaccgggcacggtggctcacgcctgtaatcccagcactttgggaggccaaggcaggcagatcacgaggtcagaagatcgagaccatcctggctaacatggtcaaaccccgtctctactaaaaatacaagaaattagctgggcatagtggcgggcgcctgtagtcccaactactcgagaggctgaggcaggagaatggcgtgaacccgggaggcggagcttgcagtgagctgagatcacgccactgcactccagcctgggcaacagagcaaactctgtctcaaaaaaacaaacaaacaaacaaacaaaaactcttctcattaaggacaatggaggctggaaggcagtggaaaaacacactaaacaaacaaacaaaaccccaacaacctacatcaaacacaatgtccttcaagaatgacaacaggcctggcacagtggctcatgcctgtaattctatcactttgggaggacgaggcgggcagatcacttgagttcagttcaggaggtcaagaccagcctggccaacatggtgaaactccatctgcattaaaaatacaaaaattaaccagaaatcgcttgaacttgggaggcggaggttggaaaaaaaaaaagaaaagaaaagaataatagctgggtgaagtgactcaagcctgtgatcccagcactttggaggggctgaggcaggaggattgcttgagcctaggagtttgagaccagcctggccaacatatggaaatcccatctctacaaaaaataaaacaatagctgggtgtggaggtacatgcctgtggtcccagcaacttgggaggatgaggtgggagaactgcttgagcccaggaggttgaggttgcagtaagccaagatcacaccactgcacttcagcctgggcaacagagtgagactctgtttcaaaactaaaaataaaaaaatgacaacacagtcgacctgagctataagaagtgctaaagaaagttctttaggctgaaggaaaatgataatggagggaaaaccaatcttcagtaacaaatgaagagtatcagaaatggtacatatttgggtaaaactaaatgactacttttttcctctttctttacaatacccacaatggattaatacaaaaattgtaacagtcttatggagtttctaatgtatttagatgtatgaaattcacatgacggctataacataagacatgctggctgcaagggtgggtggacaaatggacctacatggttgcaagttttctatattttacatgagataatacaatactaacctcaagtagactatgaaaagttaaagctgtacatgatatttcctaaagcaacctctaaacaatcattaaaagaggtatgattaaaataataaaaggccaatagacagaattcaaaaaaacattcaaacaattcaaaagaaagcaggaaacaaaacatgggataaaaagcaagcaaataataaaatagtagacttaaaccatatcaataattacattaaatgttaatggactaaacattacacttacaaggcagggacttctgactggattttaaaaaaaaaagcaagccccaacactatgctacttacaaaagacacctatcagttttaaagatccaggtaagttgaaagtaaatggttgaaaaatgatgtatcatgtagtgaataacatgaggagaatgaagtgattaaacagacttcaagacaaagaacatcaccagagatcaaatgggaatcttttataatgataaaaaggttgttgtgtcagaaagacacaacaatcataaacacctatgcacctgacaaagcttcaaaatacacaaagcaaaacttgatcaaattaaagtgcagtatgaacaattccacaatcataggagaatgtttaacgcctctctctcagacactggtaggactaaaaaacaaacaaacaagacacagataatctgaacactatgaggaacctcaacctcactgccatttgtagagcattacacccaacaactagatacacattcttctcaagtgtacatggtttgttcaccaacataggccacaaacaacaacccttgattaatgtgaaggtattgaaaacatacagaatatgttctcaaataacaaatttaattaaaaatcaataataatagtattataatatacctaggagaaaaagccaagtatctggaaatgaaacaacatacttttaagtaatccataagtgaacagaattcacaagggaaactggaaaatatctcaaaactgaatggcaatgaagagataaagtattcaaatatatgaaatacatgtaaagcagtgcttaagggaaatatgttgctttaaatttatacagatgctccttgacttaccatggggttacatcctgataaacccattgtaagttgaaaatattttaagttgaaaatgtacgtaatatcccaataaacccatcacaaagcaaaaaatcagaagtcaaaccaatgttaagtccagacactccttgacttatgatgggactgcatctcgataaaactattgtaaagtcaaaaaactgtaaattgaaccatcgtaagtcagggaccgccagtactagaaaatgaagtctaaaattaatgaatgaagcttggatcttaagatgttagaagagcaaagtaaccccaaataaataggagtaaggaaatggaaaaaaatagaaatagaaaagagaaaatcaatgaaatagaaaacaagcagtagagaaaaatgaagccaaaagctggttatgggaaaggtcaatgaaattggtaaacagatcaccaataccaggaatgctagggaaattctcactacaggtcttaaggacattaaaaaggggccaataagaaaatactgcaaatgagtctttgccttcaaggagcttcaagcgctaaagaccaaaaggtccacagggagtgagcgaggtgggcgccagggtagcaggagccctgagaaggagggtgagtgcccgtctctgagcaggccccgggcctgggttgcagcctagaaaacggaagaaggctatgaagcacgctcactccatcatgaacatcctctgctccatcaccgaggctgcttttttttttttttttggttttgaaatccaagttgacacctatttaacccaatctcttgggcataatatgcaaaatacccggtgtctgccacgcccggggatgggagtacaggtatgctggagttggaaactggagggtcagagttggctgatgctctcaggagacaccaggcaaggcagccgggctgagacgcctgcacttactcctgccgtgacgggagcacctaccaaacgtgactctaaggtccccaccagtgctgtgtgttacaaggaccgtgcagggtggccgggtccatgcgagcatgtggtgcttgtgtgatttagtcttttttgggagatgaaggggcagtgggggcagatgactagagttgaggggtaggaatggggatagagaaataagaactatgggtgacatcctccttgccctgatgtggggccactggactgctaactgcaccttggggctcacaggatgtcactgcagtgactaggccagtgagctccctcactcagcaggaatgaaatcagcctgggataccagctcccggagaacagacaccatggcccacactcgcaggcaccatgtacgctccacgaagggaagggggccttcgggaagcgccacccttaccacacagagcaggcacgcagctctcccgggcaacgtcccaccccactcaccttcgaaggtaaggaagggtttttcgtgaatggatccgaggtaaatgggtcattctttgtctgtttcttgaagaagtcgtcagtggcagagccacggaatgggtcactttctttgaaagggtcccctccaaatggatctagaaggaaaaatgccccataagtaaacattataccaagtgaaagaacccagacataaaagaacacatcacagaatgatgccgtttacatgaaattctagaaaggtaagaacgctagtgacggaaaacaggataatggtggccaggggaccctgaggagagggtggagggtgacaacaaaggggcctcaggaatgacagaagtgttctcaaattgcacacaaccgtgcatatttaatgaaactcatcttattacatagtaaaatgggtgaattttgttctgtgtaaattatgccactcaataaaattgactttaaaaataataatatcctggccaggcacaatggctcatgcctgtaatcccatcactttaggaggctgagataggaggatcacttgaggccaggagttcaagaccagcatgggcaacacagagaaaaataaaataaaaaattagccaggtgtggtggcacacgcctgtagtatcagctactaaggaggctgaggcagaaaggctgcttgagcccaggaggtcaaggctgcagtgagctataattgcgccactgcactccagcctaggcaatagagtaaaaccccatctctaaataaataaataaaatatcctgcaggagctggatataataataataataataataataataataataataataataataataaacaacgcaggtaaatccatagagacagaaaataggttggtgggtgccaggggttgcgggagggaatggggagtgactgctgattgggatggggtctccttttggggggatgagaatgttgtggaactagatgaaggtgatcattgcacaacactgtgagtgtgctcaataccactgaattggatgctttaaaacagtgacttttatgttacataaatttcacctgaaaaaaaataaatcggtcgggcatggtggctcacgcctgtcatcccagcactttgggagaccaaggtgggcagatcacctgaggtcaagagtgtgagacgagcctggctaacacggtgaaaccccgtctctactaaaaatacaaaaaattagccgggcgtggtagcgggcgcctgtagtcccagctacttgggaggctgaggcaggagaatggcgtgaacccgggaggcggagcttgcagtgagccgagatcgcgccactgcactccagcctgggcgacagagcgagactccgtctcaaaaaaaaaaaaaataaaaaataaataaataaataaataaataaaataaataaataaattagcaagcaatgtgatcccaccacactccagggtggggtgcgggcagtgactggacctggggaggggagccacctccagaagggaacgggaccgagaatgggtacaacatggatggacggccgtccttcccagttacatggctgccatccccggtgtatgtggacacaagtcccaccacatgcgacttctgagccaggactggacacagtctaaagaccggtccgggaaacactgaattttacctgttgaagttgtctgctgttctgcaaaggggtcattctggaacgggtcgcctggttggaagaggagagaaatgcttattagctctagggcacaggatgcgggccgggcccttggacacagccacccacctcccaagcctttcattgccttctactcctccagtgtagggagagaatgttagttccttctctactatccacctgccctcaaaaccttggcaaatcaaagagggggacctggaggaggcagctgtttctggctaggatgtttaagatgagaaggaaggtactgctggctgtcccacacagactggagttggggaagacacagagtgggctagaattcactcctctcttcccatgctgggtttcctttatcccatctgcctgccagctccctgggtaagaggacacaggaccctgggctgtccctcactttatcaccggccctgcagcaatgaggcggcggcacccctgggcttcaggggctgccagattcgcctctcagacccggcaggcttcaaacccaagctgaagctcaagctcccgctgccctctccccacctcagtgtttttctcaaaaatgtagagagccttcctcctggaaatactgttttgctctgaaacatggacagaaacttggaaatcttgtttctggaattcttagttattcttgactcaggtgtggctctggacagactcctaaaattatccagaccttaggtttatgtaggaatccatggttttccaggtactttcatgatcattactagctctgattattttatcaaccctgtgaggtgagcaaggaggaaatttattaacctgctgagggattaggaaactgaagtactgaagggttcaagggggctggccaagctgccttcaaatgtgggtcttgtggtgagcttggaacacttcccactgtatcttgatgccttggctctctggttaacagggtgagataagaagcttaaaaggcgttcctgctgggtgcggtgcctcacacctgtaatcccagcactttgtggggctgaggcgggtggattacctgaggtcaagagttcgagaccagactgggcaacacagtgaaaccccaactctactaaatatacaaaaattagccgggtgcggtgatgggcgctgaggcaggagaattgcttgaacccaggaggcggaggttgcagtgagccgagattgcgccactgcattccagcctggctgacagcaagagagcgagagttcgtctccaaaaaaaaaaaaaaaaaaggcattcctttccccctccatttcagattgtggcatgtccttacttttctagttgaagaaccactctaaattcgacataaaacacacagtctttcaatgagaaagtgggtagcaagtgagatacctttgaaggggtcagctcctttaaatgggtcagatttgaaggggtcttctgtctggaaaggatccggatgcaactcttgcgtgttgttgctaaataacaaggctttatttttgaaaggatcatcctacaattttgtgaagaaacaggacagggattttattatttctgagttaaagcaaagtacggaattccatacttaactcacatttccactttgagtagcatgaccctaaaaagaatgatttagccaggagttcgaggctggcctgggcaacatagcaaaatcccatctctataaaaacaaaaatttaaaaatgaggccaggcatggtggctcacgcctgtaatcccagcactttgggaggccaaagcaggtggatcacctgaggtcaggagttcaagaccagcctggccaacatggtgaaaacctgtctctactaaaaatacaaaaaattagctgggtgttgtgccgggcacctgtaatcccagctacttgggaggctgaggcaggagaactgcttgaacccaggaggtggaggttgcagtgagctgagattacgccattgcgctccagcctgggcgatagagtgagtctatctcaaaaaaaaaaaaaaaaaaatcaaggtgtggtggcgtgtacctataatcccagctacttgggaggttgactcaggagattgcctgaacccaggaggtggaggttacagtgagctatgattgtgccactgcactccagccacaacagtgcaagaccctgtatctttaaaaaaaaaaattaattaaagatcattgaagaagtatgaacttgagtgaataataatgtttaatactggttcattagttgtgacaaatgtactatatatgatgtgactaacaggaggaactgggtgtgggatatagaggaactatgcactatctttgcagtttttctttttctgaaacagggtctcactctgttgtccaggttggagtgcagttgcacactcatgggttactccagccttgaccatctgggctcaagtgatcctcccacgtcggtctcccgagtagccaggactataggcgcgcaccaccaagcctggctaatttttatattttttgtagaaatgaagtctctcactatgttgccagggctggttttgaactcctgagctcaactgatcctcccacctcagcctcccaacgtactgggattataggcatgagctaccgcacctggcctatctttgcaattttttcataaatctaaaaactattctaaaataaaagttcattaaaaaatcattgagtggaagcaactcaaatgtccatcgatgaatgaatggataaacggaaaaacaaaatttttttctaagtcagaaaaaaataatgaatttgaaatgtcatcaagaaaattgtaacgagccacacaacagaatctgattcagccttcaaaaggaagcaaattctgacacatgctccaacatggaagaaccttgaggagaggctgctgagtgaaatcacagtcacaaaacaacacacaaggtatgattccacttctatgagaaccctagagtcatcacattcacagtgacgaagtagaacagtggctgccaggggctgtgggtggggggatggggagtgggtatttcatggggatgaaaacgttctagagctgggttccacaacaatgtgaatatacctaacactactgaactgtacacttaaagacagtgaagatggtcaagtttatgtctatttttctttctttctttttttttttctgagacagagtttcactcttgtcatccaggctggagtgcagtggcgtgatctcggctcactgcaacctccacctcccgggttcaagtgattctcctgcctcagcctcctgagtagctgggattacaggcgtgcaccaccatgcccagctaatttttgtatttttagtagagatggggtttcaccatgttgggcaggccagtcttgatctcctgacctcaagtaatccacccccctcggcctcccaaagtgctgggattacaggcgtgagccaccgcgcccggctgtttgtctattttacctgaaagttaaacaatttttttttaatcaatgagtcagaaaaaaataataaacttggaaatgccatgaagaaaactgtaaagagccactcaacaacagcagcacaggcctcatttcagaggtgtgaccttcctcaatcatccttttctcggtgagtatgtacctaggtgggcatttgggaaaatggagttttcataccaagaaacatgctggttgtttctgtcctatgaggaaatgagtacttatgcagttagaattactagagcatacacaatgctttgcattttttttttaaagtgtgtatttctagaaacaaacaggttcatttaaacgagaagaaaaaatatttacttttgaagagcacatttttgtaatgggaagtagtctgaaaagggtgggtttgtcatatacatgggaacaatacagttggtttaaataaggactctgttttagttaataaagacacaccctcagtgaaaacatgaatgtttcactgtgatattaaaaaaacagcacaacaccctcattgaatttggcagacacactggcattcctgcgtaggactcacaaaccagtccagtattccaaccgaccaaaacaaaatcattaaaaagccggggcgtccacaaaaatagggacaatggtgtggggaaatgacatcaaaggtccaaaagaaagtttcctagcaaggctgccaccaccctggggcagccaacttaggggtgcaggacagttatgagaggtacagagttaagacaagccaccggtctgggctgtgaatgagtgtgaatcagcatgagtgccgcttcctcggcccccacttcaggagaatgcacccacatccctgccatctgatgaacatggaatggtttttcttacctgggaaagaatagctggagcctccgaccacagggttttcccaaggtggggaaaccaagccgggttcttagacaagttaagtacagatgtccacaagcactgcagctggagacagtgctgagtggacgtcaggtgctgacgaccacaagacacacacgcccagcaagcgtctgatgggggtctcggatgcagataaagatggagaagtcctactctaaagaagccaggaggcccacgtggaaaatctgcctttcacactgccccatggaaggaggaatgtatttgttccagaagaaagagaggaatcatgacctggataaagcagcgagttaagaatgccagcttgacctcagaatgaaagcttctatttagtttgtttttaaaggtaggatctcactacgttgcccaggctggagggcaatggctattcacaggtgcaatcccactactgagcagcgtgggagttttgacctgctccgcttctgaccagggcaggtttacctctccttaggcgactggtggtcccctgctcccagaaggtaccatactgatgactaacttagtgtagacacccaatcagcatagcacactacagcccagaactcccgggctcaaggatcctcctgcttcagcctcccaagtagctgggactacaggcactcgccaccatgcctggctctatttagtttttaattggcatttatttataaggtttttttttttcagtgttttcagtcgtcacttggaagactgccaagtaacagtgaacaatggcagagaagagactgaggttctgggaatgctggctgcaagccccctgcactgacagtcaggcctgcaatcactttctcaggagtcattggcctgaagccacaatcactccttccccttccaaggggaagcctgagaccccagcaggattcaggaggtcagggtaactaatagtggttttgattccattgcacagaatcagagtgggaaacgagatttccctgttacaaagataccatcaactctaccccttgcagaccacctactaaggagaacagacccatctgccaacttgggggacacgagtacagcagacaagggccaggatgaatgacacggcccttggcagagatgtaatatcttgaacaagttcagcaaccagtgtgaagttgtacccttcttaggaaatacacacggcaactctgaaagggggctgaagaagcttctgtgacattcccgccctttagaggagtgctgggcagcaggggtgtgctgggaatcagttctctcagaaaaaagccctggtttagagcttctgccaattcctgtggtgtaaacagtctcatcatggttgatttcaagtttccaagcaactagctcacaagttcctgttttttgctttttggggttttttttttttttttagagattgagtctcgctgtgtcacccaggctggagtgcagtggcacgcagctggcctcaagcaatcctcccacctcagcctcccaaaggactgggattacaggtgtgagccattgtgcccggccagttcctatttaataatcggttctggaaagtcaataaaaactggctccagcatgccactgggtctggatgtgacagatcaatcaacctttcttaatctgtcctcagtaaggcctaagtctgggatgatttattagcttctctccataagttgattggatggtgagcaagaggtcaatattctcataatcagatgatagacaagaaataaatatggctttaagaaccctgactttggcgggtgaggtggctcacgcctgtaatcccagcatttggggaggtcgaggcgggcagattgcctgaggtcaggagttcaagaccagcctgggcaacactgtgaaacctcgtctctactaaaaatacaaaaattagctgggcatggtggcacgtgcctgtaatctctgctactcgggaggctgaggcaggagaatcacttggacccgggaggcagaggttgcagtgagctgagattgtgccactgcactccagtctgggagacagagcgagactccgtctcaaaaaaaaaaaaacaaaaacaaaaaaaaaaaaaaacccctgacttttgagataaagtcacactgcgtgagcttcacatggaatttagtaacctgagtagaactgtccaaacataggaagttccagatgtaccactgtggatacactattctcagggacctaaaacccccaacttcgacccacaagggagaactaagacacctctctctcggctctgaagcagtcttgaagtgttcaggagtaaacaaaaatctctcttccaagtatttattaagaaatagaaacaagccagaaaaatgctttaaaaactgtatttgtacaacaggataaaaacagtttttctttcggatgccagttgcaagtttccatgtaacgtatcttaatctacattcccaaagtaattgtgtctcaggtaacctttgccctgcccaaaagatgaacaaaaataaccagaaaggtaaaaatctgtctttggagttgggggaatcactggccacttgcaaactgccacttcactgccaacttttatccaagaaaaccggtttctaaaaacctgcaaaagggacatttaagaggaagctgttccctgaacgaagactgagcaggacaagccaaaagcggtgccaggggacaatgccagatggggaaagtaggagccgggttgtgagacggaaacacacacgccaagaacagccagggagcaaagcgaggagttctggcttctcgtaactcatgaaggatgaatgctcatcgtttaaatttagacgataaagctgatgatgacgggcccgggggcggctatggaaaccacctcattacgagtccacgagaaaagagagtatgggaggaaagagggaggcggtgcacccagcgggggccagacacaagagacagatgagctcgccagcagtgccttcccagcagcccaggggacgcgtgtgcttccccataaatccttgggactgaggacttggctgctgagaaaagaaacacatcaagcattgaacataaagaggcaagtgtggtgtttagagagcacgagcgctcactcttattccagggaggaagaggaatccatgacgtacagaggcccaggagcagaagggctccagggaggagccctgggagagagggtggcagcacggagagagctgctggaggcagcagagcaccaaggaaacatccagacatgcgcggcccggcccatccgctcccggaacagcaccaagacgaaatgggaaactacatgtccccaggttcgaggctgcaggggcagactctggtgtgaacaggggggatgtgaccacctaaggaaaaggtcacacctgtcttggtatcaggggctcaagagctctcaaaaatgtaaggggccgacagtcccctgccccaggcctgatcacaactccagggtcatgaggtcagagtaaagtgcagaggtttttaaacataaccaaaatttcaggagaggccaattcttacttgaaagagcaacaccctggggcgctgcttgccattacttcctcatctttagcaacacatttgcttttcaaggtgttccttgtggaaacacacatacacatagacacatgcccctcagatgtcccctgccccctgattagtagaatgtggggtttccacaatgagcagaaactgatccaattttggttaagtttgagaagccctctgaacttgggtggttggcccaatgtaaatacttccgcagagatggagggcattcaaaacaggttctgaaaggatccaggcctatcttggactttgttctggaagccaggattcagcatggccacctgtgccaggctgcaaggcctggtgtgaacgcgcaaagtggcagcaaaaacaacagacagccgcctgcacttggctggaaccaacgttggccatgaacagatctggcgggtgggatgttctgctgtcacaccaggggaccagagccccatactgtaatacgtttattcaacctttaccatggctccaaaactgcccctctctgccagggagacgccttcgctcaggttggccaggtcggtcaggctggcaccatgggctccatcgagcacctggtcatactgctccaggctcctgtgggcctcctggcggctttcatgcagctgggaaagtttgctccttgcctgtgcaacaaagacatcatcagcattaagcagggtcaggaaaacatgtcagaaaagacgctttttttttttaaaacacagggtctcactctgtcacccagactggaatgtagtggagtgatcatagctcactgtagccttgagctcctgacctcaggagctcctcctgcctcagcctcctgagtagctgggactacaggtgcgtgtcaccacctatatttttgggcaacaaaccaagacccatctctgcaaaaaatacaaaaaaaattctgtattttttgtagagatggggtctcgctatgttgtccagtctggtcttgaactcctggcctcaagtgatcctcttgcctcagcctcctaaagtgctgggatgacaggtgtaaggcactgcactgcgcaaagcaacatatctttgctcctgacacccaactacaaactctaagggttagaagagaaaacactgaaagtaatcctacagatattaaccataaagcacaagaaagggtggtaaatctctgagcggtccatgcttgcgatcaactgtggcctataaactggctaatggagcacagacagagaccagttcaattggtaaaagaagtgtgcctggccactccgacacaggcgagggccagtgtcacaaccactgtgtagactggatgcccagggccaggacagaggccttcatctactgcccacaggagagcagggaagggcaacggctgcaggccacgagaagccagcgcccccccctggactgggaagagggtgggggcgtcccaggcagcttagagaatgggggtcctgcatggcgtgatgctccagggtggcgcctcctgaacacaccagtggctgtggaggatgacgtctgttctcttgcccaaggacaaagaagtcatctctctgactttgtccctcttgtttgtgtgaggaccaggctggaaagaaccccaagttctctccaaatgagccattaattaagtgttcccaccccaccccgcctactccttgaagatgctgtgtgctcaggaaaggaaagtgaactcctccaggccaatgccaacaaactctggaacatgccctggggagtccttggccctgcgcctccaggccagcaccacagcctcccaaaagagaccctcacgtaagtaacaagggtgagagcaaaggagttcagcagtggcagcctcggctcttggggctcgctggtccctggcatgtggcagggacccgactccgtgaagtacctggttgatttcgtcttgcgttgacttcagggacttgatgatggtttccagctggactcgcccagcctgaatgctctgctccagctgggtttcctcctgctgcaatcggttcagctccgacttggctcggttcagatcgtcttcctgggactttaagtcagattcctgagattggatttgcgttttcagtgatgagatctgaaatgagatgttaaaagatgttaaagagattcacagtgcaggatgaaatgggactccgagaaagaactcttagcccccatccccgaaacaagctaagccagggacgcagacacctaacccaggcccgacacctggcttccttacaggcctctttctacacccaaaatagagacacaaatgaaaaggcagatgggctcatcccactgtggctaacggaagatcactttggaataatgaggggcatgaccaagcacgaacaatctgtccatccccccagaggctgaacgtcatagagttttctgaggttgcagcctccgggatctgtgaggagcctcagagacacctgaggaggggacacaggcaccctggaactccctgtgttgtggggcacagccaggtggggtgtgttcagggcacaagttcgcagggaccaaggccattcacttatacaacctgacttctaggagtacaggggggtggccaggaagtcaagccacaggtgcttggacacttttccacgtggtgtttggaggaactctattgacccagtaggatgtctaagtgttgtgttcccaggtaacacgagctcaggggagtccttgggaagcccctgcctgtgcatagggcgctgccccggaggtggccgggacccaccatctgagtctcatcctggcacttctgccggacgtcgctcagcatgtctcggagcttggccttctgctggtccatctcgtccaggcggtcttgagcatcctgtttctgagcctcgagctcctgcaaactgcttgtttcccggtctaggtcattttgtaattcctagggaggagttgcaggggtttacgtgaggatgggaaaaatgaagcatgtccaagataacggggggcagcctgggccagaagtccaggggaagcctccgaaaccacccactgtgaccgtgctcagggccagcattccgtgcacacccacggccaatgtgtgcctcttgggctggaggcccagggccactgtctcaccagctccctcagcaggtatttcccgatggcctaacagaggccaggtgcgagagaaggggctgggtccctgtgagaaaaaggccccagctcccggatgacatgcagctgtggctgcggaggggaacatcacccaaacgcaaataaacgtggacaagtggcaccaagggggtcacagggaaactacagtcacaccttgtgggcagggaagatgcccacaaaagcagcatttaggatggggccaacaggtgagcaggtgccaggcaggtgaagagccagggacagagcctggcggagggaaccacagggaccccagggtcggggggtgtcgcactccagctagagcaaaagggaatgggtggaggcatcagaggctgcaccccacaggccacgccaaggagactgcgctgggctctgtggtggggagcccggtgggatgtgtgagtgtgggaggcgggacatcatgattctgtttctgaagctctctctgaccccgtgggatggatccagatggtcagcccgaggctccaatgccccatgattccacttccaagaaaagcatcctggaagcatacagcgtgtgcagaggtatacaacgtctatgacagcaaaatccgtaaacaatgcagatgtccatgaggtgctggctggaaggttccagcacagcccacactgtgggacgctccttggccatggaacgggatggcgccgtgtgctttgccttacagtgggacatgagcacactgcatttgtgcgaacgggaaggggagggtatgtgtggtatgcatcaacctttctggaaggccccctccaggagctcatgaacagcacctccggggatggggacacccaagaagagggcagaggcttctcacctcctgattttcaaccacgcaaatgcattatctgtctttaagataaataaccaaagctgaaatagcacaacgggcattgtgacaagcctcctccctccagctgccatgtggagcgtggtgcaaggggccatcaggacgcaggaactgcaggggcctcgggtggggtccagggagaggcagcagcagctggggcctgagtgaggtggtggtcgtgagaatggagaggaggggtgggtttgcggggagccatggctgggtggtggggctgagtccgagagccagcctgggctgctggggtggctggtgccctgagataacaaaaccagaggtggcccagggtctcccctctcctcactatggggacaaaaacatcctggtgcttccctgcctcgataggcaaatcatgcctcaggaagctggggtctccgttccccagtctccctgcccctggcctttcacttgagggctggatctggaggggacaatcagggtcacttatggacatgttcgacaggaaactcaggagaaagactccagtgagtgtgccaggaagggaagatgctggaaacataaagtcaggcgtgtcagcatcaaggtggtatttaaacacgtgggaatgggtgaggtgtccagtggggggcacagagagagcctgaggtagcccaatgctccgagcgatgctcccaccagggacggaagcctctagagcctcctaagtctaaccctggccccatcaccgggtaacgctggcagcaactccctggtgtcctgggcctcagggttctagttagcgccacactggctccttccaggccacggcccatggatccaggacactaggggctccaacacctttggcctgcccagagaagttccctcctttacctcctcctcaaaccaaagatgccaaaatgtgtacatcacatccttcatgcacagagcagagaatatttgcccagaagaggcatgacaggaggacaagagggaactcactggccacatgccgtgtactgaatgtctgttgttgaaattctcacccccaagatgatggtattaggtgtggggcctctaggaggtgattaggtacagcccttgtgagtgggattagtggccttataaaagaggcccctgagagctgcctcgatctttccactgagggaggacacagcaagaaggtgctgcctatgaaccaggaagtgggtcctcaccagacgctgaatctgcaggccccttgatcttggacttcccagcctcctgaactgtgagcagtaaacttctgttgtttataagcctcccagtgcatggtgtgctgttatggcaagccaaatggactaagacacacatgccatgtcagcgtctgcagtgacaaaggtgctcagggtacctcaccacttctctaagagggttctcacagtctcaacccctcctcagaagctcctgccctactcactcttggctctcccttccctttcttctccccactccccagcatttttttttcttttgagacagaatctcactctaacacccaggctggagtgcagcggtgcagtctcagctcactgcaacctctgcctcctgggttcaagggattctcgtgcctcagtctcccgagtagctgggactacaggtgcacgccaccacgcccagttgcgtgatttttttgtttctgtgtttttgtatttttagtatagactgggtttcaccatgttggccaggctggtcttgaactcctggcctcaagtgatccgccagactcagtctcccaaagtgctgggattataggtgtgagccaccatgcctggccttcttttccccttcttgattcttgctttctcccttcttgatatataaaatcaataaagctgaaatacacaattgtttaaaccttgctgggtaattttttgcacatagtttctcccccatttaggaacctgagctgcagtttccttcagggcagtctccgtcttcccccttcattgaaaaatgtcattgctccgtcaggccacagcgcagccaacccctgtgacgtgacaactcctggattcccctagacactagtggagaccctgggccagaaggggtggctgctgatgggacagagactgtgtctccaaacccctgaactgaggcattaagtctaagaagtttgggggtgataacacagaataactgaaacagagttagttgtgggagctggggatgtgggtggccacatctaaggggagtgatggataagggaagggaagatgggaagagcgttaggccggatggggtagctctggacaccaggtaacaacagtgtggaactgaaggaacctggacctcattccgtaatggagaaggagccatcagaaagtcccagagggacaaagacccaccagctcgaggttaggaaggggagctcagagcaaaaagaagacaaaaataaccccaacagtccacggagtccacacaatccctgtcagaatcccagctggcttctttgcagaaacagacaagctgattccaaaattcatatggggccaggcacggtagctcacgcctgtaatgccagcacttttggaggccaaggcaagcagatcatctgaggtcaggagtttgagaccagcctggctaacatggtgaaacccagtaaaatacaaatttgtaaaaatacaaatttttacaaaattttgtaaaaatacaaaaattagctgggtgtgggggcacgcatctgcattctcagctactcgggaggctgaggcaggacaatcacttgaacccaggaggtagtggttgcagtgagccgagattgcgccactgcactccagcctgagtgacagtgagactccgtctcaaaaaaaaaaaaaaatcacatggaaacacatgggacccagaatagccatgacaaccctgacagagaagaaaaagatggaggatgcccatttcctgatttcaaaacttttacagggctgcagtaatcaagtcagtgatgtagtggcatgaggagaggcagataggtcaatgggatagagctgagggtccaaaaataaatgcacagctatagtcaactcatccttgacaaggatgctagggccattcaacgggggaaagaagaggctcttcaacaaatggcactggcccagcatggtggctcacacctgtaatcccaacactttgagaggccagagtgggaagatccctagaggccaggtgtttgagatgagcctgagcaatacagcgagaccctgtctcttaacaaaaaaaaattgtttttgaattagctaggtgtggcagtgcacaccctgtagtcctagctactcaggaagctgatgcaggaggatcccttgagcccaggattttgaggctgcagtgaactagaatcataccactgcactccagcctcggcaacagagcgagactgtctctaaaaacaaattttttaaagtaaaataataaaaacaatggtgccatgacaactagatgtccacatgcaaaacaatgacattgcatccctgccttatgctatatacaaaaattaactagaaatggatcaaagacctacatggaaaagcgaaaactataaaactcttagaagaaaacacagggatacatcatgtgacctgagatttggtaatgggttctcagctatgacaccaaaagcaacagcagcaaaaaaaggataaaccagacttcaccaacattaacaacttgtgcttcaaaagacaccatcaagaatgtggaaagacaatccagagtggactctcagtggatgctgagaaggtatttgcaagtcacatatctgacaaggacttctacctagaaatgataaagaattcttcaaattcagctataggccaggcgcagtggctcccgcctgtaatcccagcactttgggaggccaaggtgggaggatcacctgaggtcaggagtttgagaccagcctggccaacatggtgaaaccctgtctctactaaaaacacaaaaattagctgtgtgtggtggtgcacacctataatcccagctacttgggaggctaaggcaggagaatcacttgaacctgggaggcggaggttgcagtgagctgagatcgcaccactgcactccagcctgggccacagagtgagactctgtctcaaaaaaaaaaaaaaaaaaaaaaaaaatcagctataaaaagaacccaattaaccaggtgtagtggcacatgcctgtaatcccagctactcgggaagccgaggcacgaaaatcatttgaacccaggaggcggaggctgcagtgagctgagattgcacccttgtgctccagcctaggcaacagagtgagactccgtctcaaaaaaaaaaaaaaatgcaatttaaaaatcggcaagaaaaaaattttttcaatataaaagggcaaggaatcggaatgatttttctccaatgactacatacaaatggctaataagcacatggaaagatacttgacgtcgctagggaagcatgagggacatgccaatgaaatccacaatgaggcagtgctccacacccaccacgacggctagaaggaaaaacgggaaatgggtaagtgttggtgaggctgtgcagagctggcaccctagtacactgcttatgggaatgtaaaatggtacagccactttgaaaaacagtctggcagctcctcaacagttaccatgtggcccagcaaattcactcccaggtatacacttgagataaaggcaaacaggtgttcacacaaaaacttgcagacaaatgttcctagcaacaatatttgcaaagccaaaacatctatcaatgagggatggatgagtaaaatgtggcccatcgtggcttggcatggtggctcatgcctgtaatcccagcactctgggaggccgaggcaggcagattgctttgagtccaggagtttgagaccaacctggacaacacagtgagaccttgtcgctgcaaaaaaaaattaaaaattagccaagcatggtggtgcatgcctgtagtcccagctactcgagaagctgaggtgggaggatcacctgagtctgggaggcagaagttgcagtgaaccaaggttgtgtcactgtactccagcctgggcaatggagtgagacactgcctcttaaaacaaaaaatgtgctccatccacacaatggaatattattctgccataaaaaggaattcaacgctaatatatgctacaatatggatgaccctcaaaaacatgatgctgagtggaagaagccaggcacaaaaggtcatgtgttgtatgattccactgacaggaaatgtccggaactccaggtacctgagataaatgcaaacaggtgttcgcacgaaaacctgcagacaaatgttcctagcaacattattcacaacagccaaaaagtgggaaaacccaaatattccccgatgggaggaacagatgaaggaaatgtgccccattgtggctgggtacaaatccatacacacagaaaaaagatgagtagttgccaggggctggagaaaggggagaatgggaagtaactgcttaatggggatgaggtttccttttgggttaatggaaagttagtgtcaaactcttccactcactgaaagagaacagttaacgatgaatctttcagaaagtaaccttccatttactgttcagggctagatgtttttatgggcctactggcgcctacgggagaaacaatcaggttctaactcgatagagtgatggttaatcaacacggtgattatgcgaaacaccactgaaatgtacactttaatacagcacatttgacattaattacatagccatccttcagattggtattaaaatttgcagatgctcaagtgtgacataaaacggttcagtgtttgcatataacctacacatgtcccctaccctagcaccaccccatattacttattcatttatttttgaggcagggtctcactctgttgcccagggtggagtgcagtagtgcaatcacagctcactactgccttaaactcctgggctcaagtgattctcccacctcagcctcctgagtaactgggactacagacacatgccactacacccggcttttgcaaatatttttgtagaaacagggtcccactgtgttgcccaggctggtctcaaactcctgggctcaagcgatcctccggcctcggcctcccaaagtgctgggattacaggtgtgagccactacagccagcctcgtatactttaaatcatctctaggttatttataatacctaatataatgtaaatgctatgtaaatagttatcatattgtattgtttcatcaatttggattattttttatttttttatttttttaatctgtggttggttagatccaaagatgcagaacccttggatacagagggccaacttgtctcaattttagaaaaagagaagccaccgtctatggttataagcaactttaaaaactttagcctgtaattccagcactttgggaggctgaggcaggcagatcacgaggtcaggagattaagaccatcctagccaacatggtgaaaccccatctctactaaaatacaaaaaattagccaggcatggtggtgcgtgcctgtaatcccaactacttgggaggctgagacaggggaatcgcttgaacccaggaggcggaaattgcagtgagctgagatcgtgccactgcactccagcctggcaacagagcaagactccatttttaaaaaaaaagaaaaaaaaatcttcactctcgccaggcttggtggcttacacctataatcctaacactttgagaagccaagacaggagaatcatttgagctcaagagtctgagaccccatctctatttggaaaaatatatatatatatatttttaaaaacttcttcttctccgagaaaacaccgaatggcggatgacaccggtgcagcggggggtggggggggggggggtgtcagaggccctgggatgggcaaccacagtaacttccacggaggtttcagcagtggcatctggggctggggtcgcggccgtggacagcaccggagccgggaccaaggccacggagcttgcagaggcaaggccgaggataaggagtggatgcccatcaccaagctgggccgcctggtcaaggacatgaagatcaagtccctggaggagagctatctcttctcccgcccatcaaggaatctgagatcattgacttttgcctggggggctctctcaaggatgaggttttgaagattatgccagtgcagaaacagacccgcgccggccagtgcaccaggttcaaggcgtttgttgctatcggggactacaatggccacatcggtctgggtattaagtgctccaaggaggcggccactgccatccgcagggccatcatactggccaagctctccattgtccccgtgtgcagaggctactgggggaacaagatcagcaaaccccacattgtcccttgcaaggtgacaggccactgcaactctgtgctggtgtaactcatccccacgcccaggggcactggcattgtctcagcacctgtgtccaagaagctgctcatgatggctagtatcaatgactgctacacctcagccaggggctgcactgccatcctgggcaacttcgacaaggccacctttgatgccatctctaagacctacagctacctgactcccaacctctggaaggagactgtattcaccaagtctccctatcaggagttcactgaccaccttgtcaagacctacaccagagtctccatgcagagcacccaggctccagctgtggctacaacatagggtttttatacaagaaaaataaagtgaattcagcctgaaaaaaaaaaaaacaaaaacttcattctgcagcccccaagagctcatgtttccatccagggcagacccctgcccttccccaccaccagccagggagggaagttttcctgaactacatttagcacaaagtagatgtaaccaaaacgaacgagacccttacctgcacctcgctggttttctgtctgattgcctcttccttttctcgaatgtcttgttccagtgaatatttctctctgaatgtttaaaaatatttcatgaaaacaagagtgaataataagcctccaccccttcccaaggcctgattctgttcacccccacaaaagcccctctgtgtgctggcagaagtctaagaatgagacccagcgactgctcgccctgtacagtcccttccccgtcaactgtaggtaggacctgtgaccatgggagggatcgctcccaatgtaaccaccctctaaaagcagcgcgctttctccacctggttgcccaagtggaagttagagatgtcccaagtgtgataaggacccagagcgcccttgctgactttgaaggtggaggggccacgtgagggggaacaggggcagtgtccaggagcatggagtggccctggctgacctcagaaaggaaaaagagacctcggacccccagccgcagggaaatggattctgccaacacctgaatgagcctagaaacagattcttcccctagagcctccaacaagagcccagcccagccgacgccttgacctcagcctgtgacaccctggacagcccaggacagcctgtctgaactactacttttttttttttgagacagagtctcgctctgtcacccaggctggagtgcagtggcgcaatctcagctcactgcatcctccgcctccccagttcaagcgattctcctgcctcagcctccctagtagctgggactacaggcacgtgccaccacgcccagctaatttttgtattttcagtagagacggggtttcgctgtgttggccaggatagtcttgatctcctgacctagtgatccgcccgcctcagcctcccaaagtactggaattataggcgtgagccaacacgcctggcctttttttggttttgtttttttttttttttgagacaggctcttgctctgtcacccaggctggactgcagtggcacgatcatagctcactgcatccttgacttcctgggctcaagcaatcctcccaccttagcctcctgagtagctaggaccacaggtgtgccccaccaggcctggctaattttttattttttgtagccgaggtctcaatatatggcccaggctggtctggacctcctgggctcaaccgatcctcttgccttggcctcccaaagcacttggattacagtcatgagccacagcacccagccttcttttatttttaaactgagatagaattcgtgcatgtatttcctagcactgctgtaacaaatcaccaactgggtggcttggaacaggaaaaattgattataggtgtgagccacaaggcccagggtttagtgcccttataagaaggaccccagagagcttcctttgctccttttgccctgtgaggacacggcaagaaggtgactctccaggaatcagcaaatgggtcctcagcagacccgatctgccggtatctggaggttggactttgcagcctccagaactgtgcgaaatgtctgatgtttcagtcacccattcagagtggtttgttatagcagtatgaatggactaagaccctcctcttgtgcccaaagaggctgcctcagggacaggaacaccatgtgtctaacagaccctgcctcctgcccagggacccaggacttgtgcaacaataaggccctctcagggacatgtcgccagacacacagtaagtgatcattggaatattcatttccacaagcccagaaacttacaatacaaagtgctctttaaactgaaggacctgacatgcccttgctggcttatggcagtgtgaaatcataagaggaaagctcagcccacactccccgaatcaagggccactctcagagccacctgctcaaggggccactgcaggccccagcctcctacagatgggcactctgcacacaccagcctgtcacctccacattggggaaacaaggcttctggctgtctgaggccacactggggtgattcacgccccagcgtcccttcctagaccctgacccttgcacgacaggggctccctccatccttggcctgcccggtcctgattctcaggcctgcccaggctctaggatgctggccctgcatcctcaagacaccctcagccttgtcaggctgcacatccttgctgatcgccagtttggataacacggcccccaggagctgagacagaacaggaaccatctgctgcactgaacatgaagtgggatgcctgactcaggccgtggctcaggttttctaaccagccacccaccttgatcccctccaagacctaacctgcctttgctcatcagggctctgctaacagcacaaaaccaaggccagaggagctgatagaatactgcacctgttaatatgacccccggggatcccccagctaggaccaggatccatcctccctgggaaagtcaaagccctttccattttcagccaagtaaacaatctctttcccacagagggcaaagcacctttgggcccttctgcatggtgccccgtcatcacaagagtccaccctgtcctagaatcgactggaaaaaagatgctggctggcacagtggctcacgcctgtaatcccagcactttgggaggccaaggccagaggatcacttgagctcaggagttcgagaccagcctgggcaacatggcgaaaccccatctctacaaaaaatataaaaaaattagccaggcatggtggcatgcacctgtactctcagcttcctgggagggtgagtgggaagatcacttgagcccaggaggcagaggctgcagtgagctgagatcacaccactgcactccagcctaggtgacagaatgagactctgtctcaaattaaaaaaaaaaaaaaaaaatctagccagcatggtggtgcgtcctagctactcgggaggctgaggtgggaggattgcttaagcctaggaaacagatgctacagtgagccatgatcacaccactacgctccagcttgggtgacagagcgagaccctgtctgaaaaacaaacaacaaaaaaggatgtcattcttgaagaggatccagaggggaatacaggaagtgactgcatttctttataccagactctaaaagtacagacagcccatccaaagccctcgtttacacatgaggaaactaaggcactaggcaagaaggggagccacagacctggaggccccttcacaccttcagctgctgggtcctaagcccgctcctcgccatctgagacccaattgccctagctgtcaaggataacaaggccttcctagcactggggaggggctgatgcctggggctactgagctgcgacctgcctgagaccacaaagctgccacaggctctgcccatgacctgcctgggacaacacagctgccacaggctgtgcccatgacctgcctgggaccacacagctgccacgggctctgcccacgacctgcctgggaccacacagctgccacaggctctgcccacgacctgcctgggaccacacagctgccacccacaggctctggtcaagacctgcctgagaccacacagatgctacgggctctggctgaggctgattcaaatggaagatgtcattcttcaagccccttgagccagtttaggacctcagaagctgtatcttttccttccttctgaataaacctgtgatgagcaaacttccaggtgagcctctgatatttccgataacaacctgggagagttcgtgtaacatctggatgtggagggaagggccgtttccaacatacctttgtaactgggcaatctcttgactgatgtcatcaagctccttcacgccagtaaactccccggagccgagagagcctgaactgtcctagaattgaattcagaggcgagatctctaattagcaacctgacatcacctgacaggaggcaccagcagttctcgggcccagggataaaattgtccctttagtacacagggtgaggtagcaaaagtgtcagccccctgcctggggaaatacctgggcagccaagccaccctcccgggggcccctgttgaggaaggcagggaccacaggcagcacccgccaccgtgggctcatgtgtgccaccagtgccacctggtggcaggcggtgggaagggatgtcaatacccccagggcatgaccagcaccactcaccgggccgggcgtgcctctctccgaaggcgggaccatgtccggcgagaggacttgaggagggtcgatgcctttactgaccttctgctgaatgaaatacatagctaacgcgaattggtctttgcttaacttccccgtttgcctcgtatcggccagggccctgggagaaacgtggggatgctaattacacatcacaggcgccgactcagcctgaacccaagtcaccgatcccttgcttttcaaaaacgacagcgacgaaaacaacggcagggcgtggtggcaagccccagctccttccctacttcacatctccttcccaggaagtggcccaggggttccccgctcccagtgtcccccaccctaggagggctgtcagggctgaagaaccccaagcccctgacctgggctgaggagccgaccccctgggaaaacctcactagggctgagatgcagctgcctcttcctttggcttatctcgtgcgtggggcaggctctgatgctgcaggcatggagtagaccagcccttccgtggaaatgggtgctgagaccaagcattgtccctgtagctctgggtcatctgaatggccccggctactggccttcaatggggatgacagcagcactttggggtgtcatcatgatgaagaaagaatcagcaacgactctctttccttgttatgaacggaacgtttatgtccccccagattcctatgtccaaatcctatccctcaatgggatggtgttgggaggtggggcctctgggaggtgatgaggtcatgagggtggagcctcaggagtgggattagtgcccttataaaagaggccccagaaggctctctctgctccttttgccatgtgaggacacggcaagcaggtggccgtctacaaactaggcagtgagccctcaccagacactggatctgctggtgcctggatcacagacttccaccccccagagccgtgagaaatgtctgtttctaagccactctgtctatggcactttgtcacagcagcccaatggtctaaaacactcctcttgtgcccaaatgaggctgccacaggggcatggccacaatgcacaggacagtcccccacaactaagcgtcccctgcccacatagctcttggatgtcctgaaagatgggccaaggcagcatctgaatagcagcacacagtggtcctgtggagctgaggtgagaggctccgcgacactcacaatcaaggagccagccagggccgggtgcaatggctcatgcctgtgttctcaacactttgggagctgaggcgggcagatcacctgaggtcaggagttcgagaccagcttggccaacatggggaaatcccgcctctactaaaaatacaaaaattagccgggcatggtggcgcgcgcctgtaatcccagctgctcaggaggctgaggcacgagaatcacttgaacccaggaggcagaggtttcagtgagccaagattgcgccaatgcgctccagcctgggcaacagtgagtctctgtctcaaaaaaaaaaaataaaaaaatgaggagccaaccaggaagggaagggacccttgtggagtaaggacaaggcctttggcatctatgaaaaatgtcttccttcacccatgctgccctctcaacgagggacctcgtttcccacctcccgtgtagctgcggcagaagccattacaacagaagtttccccttttaccaaaagagagctgggaccgttctaacagacttatttatacccaaatgcagtccgtgaacagagctgcggagaatgagcagatctcaaagaacattgctgataaatgcctagttatccccacagttcgaggccctgacgatttcatactgccactgtctctccccagtctgcccctgcgggccccagcctgctcgtgggctgcagctgcctctccactcccgccccttctctgctcctgccatctctcaaggagtgtgggctccaaggcccacctgtggaaggttctgagagaaagaaggagaagcaagcttaggggtggctcagtcagcggccatccggctctgacaccacatcctgctctgctgacccgtacggtggcagccatcgcagggaaaaagcctctgtcttcatgctccccctcctcccagtccctcctggtgtgtcatctacattgggccatgccccgccccagccactcgcagacacatctagacttcttttctcatggttattcaagagcctgatcatcctttccttcccctttgctgcccgcatggaatgacctctgagttccttcttttgatccaggtggattagtgatttcctgtgtcatttccatgtcattacatcatgtgtcaattgcagcatgcattataaattactttccctctactgacccctagacatgacagtcagggtgtcagggcgctaaccaggaactgtatgtgtgttggtttcagagtcataaaggggacactgtgttttgttggtttctaaaagggacactggatctgaggcagctgagacccactgtccctagccagttggaggcggcttggccatttgggtgatgactctgcgacagctagttctcaggctcccacctcacagtgtggtcatctgtgaattaccactaaggacagtcatttcccccaagccactaagtaacatcctgaatttcactgctctacttggaggtatttgcctctcgagaattatccagcaattctttccttttgatagctcccaagtgaagccttctctaaggccacaaggctctgagcaacaagctcaaaagtgacttcagccctggccagtggcaagaggagtgccccagccctatgaagtcggctgtgtccagccctgggggaaagaggggttgaggccgactcctcgactgggctctgaggcactgacagggtctccttgtgctcaccctcccgccaggagccaaagcactggcctttccagagcagggcctcctgcccccgccctcaccctgccaggccactctgctagaggctccaaggccctgctgcccgcacctcccggaggcggctgtgacaaagtccaggcctcctgttagagccagcatcacagccagcaagaatagggcccagctgtgtaagcaaatggcctgggagcacttaagacggaccagaggcccttcctactgaaagacagtgaactgaccgtcacggagcgcgggcttcgagccttggcacgtgcaccttgctcagcctctgtcaggccagggagaataaaggacgccagacacagcggaagcctgtgacaggctggagggggccccctgaccaccaccctccacagtcttcacccacaggccccctggagccacccacagccacaactgccacctgtccggccttaccatatgtgtgctagaaggttctgggtgaggcccgagtgcatgaagatctccttcacctcctggccactcacgtagccatccaggtccaggtcggtcttcaggaatatctcatcaaatcgcatcttgtctgccacgggcaccacccagttcactgttggctgaaacagtttttggcaaaacagttaatctggaagctttttatgacccccagacacatgctttttgatgatggggcgattaaagcacttccatgcacatttggcatcaaactctcctcacttccatgagccaagagggcagatgtgatccttgttctgtaactggcaaaactgaggctgagacaggttgaggctggctctgtgaagctcacccagatgccagtctgcacctctctccaccccatcacccgctctccttgtccatccaccctgccacccagggtgtgagggaggctgtgatcttcaggggatgggttcaagcatgccaggaaagaccctcccgagcacccacttggaaggaccgtccctggagaaccggcccggccacatgccagcctccctggtcctcccactcctcagcccgcaaaggctgccctacaggcagccaaagtgtcctgtcccaggactctgaagaccacccttctatgtccctgccccactcctgagacaacaaagatacccccaaggtgtgagtacacacacgtcactgacaggtaacaaatgagacaccaccatccaagagggccaccacccacgaggccccaccaacattcatgcagccccaaccccaccagggcagatggagccacgagcccagtgcagctcaaagttcacagccctggggctgggtcacccgctgcacgtgcgacccctctcgccaccagctcacagttaacttgagagaggcaaacgccatcatgggtcaaccagggcccggtcacctcctggttcagaggcattgaggcccctcaggcactcaggggcaggccccttccgtggcctactccacctgcattaccgcgggccttcaatacacccaccacgccacagttcacggcatctgtgtcctgaactctagacgtgcttttcctcttccctttttttttaaatatttacacaaatcactccttttaaacaatctcataatagcaatgagaataaacacctgattgaattatctagatgatgagggagtggagagaaaaaggacaggcaaatgtggctggagggatcgattgttccttctccacgcagcaactgtacagaaaagccactccactcctcaccttcaatgaacgccatgatgcctgaaactgccactcaaagtcattcctctcagttatgaaaggatttcttaggctgggtgcagtggctcacacctataatcccagcactttgggaggctgaggtgggtggatcacctgaggccaggagtttgagaccagattggccaacatggtgaaaccccctctctactaaaaacacgaaaaattagccaggtgtggtggtaggcacctgtgatcccagctactcaggaggctgaggcaggagaattgcttgaacctgggaggcagaagttgcagggagctgagattgtgccactgcactccagcctgggcgacagagcaagactccgtctcggggaaaaaaaaaggggggggggatttctcaaagagttctcacagtgttgacaacccgaagatgtccataggattgaggagaagggactcatggtcaagactgggaaacaatggttaaactcgtttactcttcatgaacgagtctcctgtgatgtccaaatctaacaggctcctgataccaactcagggaaatcagaaagcaagcttgggaaacaagggataccatgtgacccagatcagcttagttcaggggtttcacgtagcaagtatgtgtgatgaagtacagcaaggacttgatcaaacaatttatcaaaatccatggagctaggccaggcacagtgctcatgcctgtaatctcagcactttgggaggccaaggcaggaggatccctcaagcccaggagttcaagaccagccagcataacacagcaagaccccatctctacaaaataaataaataaataaaattagctaggtgtggtggcatccacctattccagctactagggaggctgaggtggaaggatcacttgagcccaggaggttgagatagcaatgagccgtgattgcaccactgcactccagccagggcagcagagcaagatcctgtctcttatatatttaaaaaaaaaaaatctatggatctaattcaaatgatgagagttcagatggcaagagcaacctgatttttacttgtggcattgtactgtgtaaattttgtgagccttctcaagtctggtggacgtaaagatgccaataaaggaattctaatgagaaatgggcttgctgccttttaagtcacggagctacagcaagctaacctcagaagccagggatcacaaagaggtaacaggagtcagacaagctgagctgtggcgggacacagaaacaaggggggttctgtgtcccacgggtcccaagaagaaattacgtatgaaattatagctctgggatgacaagagtcctaataatacttgctgggcaaacaaaaggaactcactgcctgatttctggagcctcagagtatgttagcagcaagattctgatgccaaattgactataaacccaacacggggcagccttgccgtggagctggctctcccagtgacagctgggctttaaggccggctcagcagccacaggtcccaaaggaaggatatcagaccctggtggctggaagtggcttcactcaaacctggcatgagggcaaaatcgggtggcccttgggaggcccagacaagagcattgctggcctggagatgaggaagttggagtagggggagcatgtggactgtaggcccccagaaatgctcgttttcatgactgtgatcctaccaatgccgtcgtgggggcaggagctataccctcccaccccaccccaccaggggccactggtaaaatcggtctagtcagagggtcttgagagaaccaccagaagatcactagagaggtgggttatgacgctgggtgacctgtgcctaccagtgagtttggccccactagcttcgttgccagtaaagtacctcccctaacctgactttcaaaactcttggcaagagctctgcagacacaggctgggcacggtggctcacacctgtaatcccagcactttgggaggccgaggcaggaggatcacttgagccaaggagttcaagaccagcctgagtaacataggggagaccatgttgaaataatgagataaatgaatactttttttttttgagatagagtttcgctcttgttgcccaggctggagtgcagtggcgcgctctcagctcactgcaacctccgtctcccaggttcaagcaattctcctgcctcagcctcccgagtggctgggattacaggtgcgcaccaccacacccagctaatttttttgtatttttagtagagacggggtttcaccatgttggccaggatggtcttgatctcctaaccttgagatctgcccacctcggcctcccaaagtgctgggattacaggcgtgagccaccgcacctggccacaagcattttttaaagacatttcatcacaagcttgaccgttctggggttgcatgttaagaactcccgagaaacatcctactgtgctctgagagggggctgtgcccgctgagggctccgtacctgtgtttgcttgaggctgtgcttgggggacaggctccctgtgctgttgaggctgctgacgctgccgtgggacggcgtggagcggaggctgtcttttggtggggggctggcaggcaggacggggacggcgccagggaacacagtcttctttctcttggagggtgggatgagggacgggggcagggcggagggcacgggctccttctccagggctcggtacaccaagtgcatggcctgcaggtgcaaacaacaatggcactgaaggggcaaggctggggccgggaccatcaggagaaggcagagggcagccctttgggggctgcagtgacaggacactctgtcaggacgctcccaagctgaccagagtgaaaagaaatcattcctcatgagttatcttttatgtgtaactttccaagacatgtgttgaattattcctcgagactgaaatgcacacagaaagaatccaatcaagccagactccatatgcatcccttcaccactcagggaggccaccagctccagggctggcaccttcccagtactggatttggaagtctaaagacaccagaagagagacctgtacttcaagacgttcaggagtagtcccagctacttgggaggctgaggtgggaggattgcctgagcccaggagatggaggctgcagtgagctgtgatcgcgccactgcactccagcctgggtgacagagcgagactctgtctctataaaacaaaacaaaacaaaacaaaaaacagtggaactgaggatgcatccatgaggcaggccacagccatagaaataaattccttgtggaaggccaactaataaaagtgcaaggaatgatggttttgattagcacatcaccatttggcagccaccatcatcataattaatcttgccagattaaggcgagactcatcagcgatggtggaactctcatggaagagtctgagagtcatgggtgttgaccgtatcaaggcgtgccccacatgagatgaactgagcacagagggaaaaagagcaactgcccacaggaacccacaaccttgacccaccttgacccagtgatgaatgtcaacatggcagtaagaagacatgttgacatcacgttcccccaggtgggaggcccatgtggggcgggtgtgacctccgtgggattcctgtctcacaagagtgcatgacctgggtcatcaagaggacctggcagccaggcccaggcctaggaacactccataactgctggcctgtgctcttcaaaatgtccacgttgaaaccaggcatggtggctcatgcctgtaatctcagcactttggaggccgagacgggcagatcacctgaggtcaggagttcaagaccagcctggccaacagggagaaaccgcatctctactaaaaattcaaaaaaaaaattagctggctgtggtggtgggcacctataatcccagttacttggaagactgaggcaggagaatcgcttgaatccaggaggtggaggatgcagtgagctgagatcatgccactgcacaccagcctagatgacagagtgagactccctctcaaaaacagaacaacgacaacaaaaaaacaaaaagtccacgtcaagagacacgaagagcgatggaggaactgttctagatcccaggaaacgaaagacaaaagacaacaggatgtaacacacaggactgggttctctttagacacaaggaacatttttgggacaactgataaaatctgagtaatatcctgggattagataataatagacacgctcatacagaatataaggggtatatacaggatataatgaaaacatcataaatgcaatgctatgatgtgaatttcctgattttgaagtggataatggttatgtgtgagagaagtccttgtttttaggaaatacgcactgaagtgtttgtggatgaagaggcatcatgtctgcaacttaaccctaaaatggttcacaggaaaacttcgtgcagcagtgggaagggcgagagagtgatggagggagggaggaagaagggaggagaaagataaaacaaatgtaggaaattagtgacactgggaaatttgactgaagagttttcaaaagaattttctgtcggaggccaaggggggaggtcgcttgagttgagttcgaggctgcagcaagggtgttcacgtcactgcactggagctggggtgacagaacaagactctgtctcaaaaacaaaaaataattctctgtattacaggttgcgtatcccttatccaaaatgcctgggaccacagggtttcagttctggagttttctgaatttctgaatgtgtgtattacacttactggttcagcattactaatccaaaaatccaaaatctgaaattcttcaatgagcatttcctttgagtgtcatgttgatgctcaaaaaatgtcagatcttgaagcattctggtttcagactttcagattaaggatactcaacctatactgaaactttcctacatacaaagaactatgtcaagacaaacacttaaaaaatgaaagaaggaaggctgggtgtggtgtctcatgcctgtaatcccagcactttaggaggcagaggcgggcagatcacttgaggccaggaactcaagaccagcctggccaatatggtaaaaccccatctctatcaaaaatacaaaaaaattatctggctgtgatggagtgcacctgtaattccagctacttgggagactgaggcatgggaattgcttgaacccaggaggtggaggctgcagtgaaccaagattgcaccactgcactccagcctgggtgacagagcaagactccgtgtcaaaaaaaaagaaagaaagaaagaaagaaggctaggtgcagtggctcacgcctgtaatcccagcactttgggaggccaaggcgggtggatcactaggcaggagatcgagaccatcctgaccaacatggtgaaaccctgtctctactaaaaatacaaaaatgaggtgggcatagtggcaggtgcctgtaatcccagctacttgggaggctgaggcaagagaactgcttgaacctgggaggcggaggctgcagtgaaccaagattacaccactgcactccagcctgtgtgacagagcaagactccgtatcaaaaaaaaaaagaaagaaagaaagaaagaaggccaggcacagtggctcacgcctgtaatcccagcactttgggaggccgaggcgggtggatcacaaggcaggagatggagaccatcctggccaagatcgggccactgaatgccagcctggcgatagagtgagactccatctaaaaacaaaaaaaaaaagaaagaaagaaagaaaagggagggagggaaggaaggaaggaaggaaggaaggaaggagggagggagggagacagagagaggagagagggagagagggagggagggagggagggagagagagagagaaagaaagtgaaagaaagaaaggaagaaagacagaaaagaaaggaaaagaaaggaaaaggaaaggaaaagaaaagaaaagaaaagaaaaaagaaaagaaaaaagagagaaagacaaacgaatccagcaacccctgcgcactgcacatttccttcctgggctgggtggggaggaaacagcaggacttaccacagcgaactcatctcgatccaagtgcccatccttgtcaatgtcactgaggtcccagacctgcaagggagagaccagcatgggtaactgtgggaggaaggactgggtgagagtgagaccacctgccggaactcagactctcagccgtggcactcactgggctcaggagacggcagtcaatatacatttcaggaccagtccgcgagttctcagaaaaaccatcacctgtgaagtactgtcaactaccagatctgtggtctgacaatcatcatgattataatcatattgattataagattataagtttaaaggctatactttaaacttaccctgagtttcttctttattgtcttacagagacatcttagaaaagacagctttgattgagtacaggtgttgccctaaacacccacactccctatgctcactcctgcaaaccccacccctcccttgcattctcagctgggcagggctgcgagctcatgtctgagcaggtctgtgggtctcgtctccactccccagcagtggatggtgagacaggtgtcaggccactcagtgcgctgaagagaaggcaggcaggcgtgggttctggagcgtgcctaagacacgtgcagatctcaagcaccatcacgctgccagcttcctgacccatgccagccttcctggatgggcacactgcctgccaggccaacgctgggcaggctgccagtccccggatctaagcagatgcccgtggctctatccatgatgcttcatgtgtcagcatcacctctctccagccaatcaccagggcttcagtccatgcaggtttctcacatctggtcctcctctccacctctgctgctgcgcccgaggctcaggcctcaccagcccacacagccaagagcctccagctggcctccctatcccagtcttgtccctatggctaccacaggaactgctccagaacacacacctgaccctgccccaccctgctcctcagcctggcagatggggccctgtcacctggctgctgctgagcccctgacggtagcaggtccctgcaccccaacccagcctccacagactccacggggacctccacctactttaccagggatccaggactccaacaggcctttctggctccacagtcctccctcagcccagggcttccccacctcagcactactgcctgttagggctggatcatgctctggggtgtgggccatgccgtgcactgcagggtggtgagcagcattcctggccttgacccaccagatgccagcagcactcgacccaggtgtgacaaccaaaaatgtccccagacattgcccaatgtcccctggggggtggaagtgtccagggggagctgtggccctaactggcatgccagactgcctgaggcctctgtgccttcactcaagttgcccacatgcccagacttctaccagagtccccctcaccctggaggatgtgaccaggggcacctcttctagaaagtcttccccagctgccctgctccccgtgctcgagtgggtcaggggccctcccctccaccactgccctcactgggccaaactgtgattatcagggatgctgtgggggtgtctaatggacagggcaggtgaagagggcaggctctagggacagctgctccagaatgcacactggaccctgccccgccctgtccacagtaggacctcatcccttctccacccttccacaactgtgcaaccaaggtgacttcccaaccaccctgaagatctgcttcgccatctgaaaaatgggtggtggaggggtgtgagacacagtccttaacaggagggctgcaagtgctggatgtgtgtcttcacgcagagcactagggcccggcctgcccatactaagccctcagtaaataagtctcagcctcttagctattacttatttgacttctttgacggtatctaattatccccaccttcccactgcccagcacaaggcatggtccactgcaggctctgaaaaatgcttactgaatgactgaccagatgcacgatgtgtgagtgcctggatgcacagatggatgacagcacggatgcaagtgcgcacggatgaatgtataaatatggacacacggggacatggcagcatagacatatgggcacaaagacgcatgcacagatgtggataaatacattgcatgggcatgtgcacacacagatgaatggatcatagggatgcggagggacatgggtgcatagatgcatggatacaaagatgtatgcatggccgggcacagtggctcacgactgtcatccatcccagcactttgggagtccaaggcaggcggatcacctgaggccaggagttcgagaccagcctggccaacatggtgaaaccctatctctactaaaaatataaaaattagctgggcgtgatggggtgcacccgtgttcccagctacttgggaggctgagacaggagaattgctcgaaccagggaggcggaggttgcagtgagccaagatggtgccagtgcactccagcctcggtgacagcgagacttcatctcaaaaaaaaaaaacttttttttaataaataaataaataatacttatatttatggttagatagaaggtatacattctttttttttttgagacagagtctcactctgtcacccaggctggagtgcagtggtatgatcttggctcactgcaacctctgcctcccagattcaagcgattctcctgcctcagcttcccgagtcgctgggactacatgagtgtgccaccatgcccagctaatttttgtatttttagtagagatggggcttcaccatgttggccaggatggtcttgatcttttgatctcgtgatctgcccgcctcggcctcccaaagtgctgggattacatgcgtgagccaccgtaccgggccagaaggaataagttctaaagttcaacagcacaacaggggaactatagctaacaataatttatcatatctttcagagtcttccagaagagaagatttgaatgttcccaacacaaagaaaggatcagtgtttgaggtgatggatatgctaattaccctgctgggatgattacacattgtgtgcatgtatcaaaccaccacgtggaccccacactacaactattatgtatcatcaaaaataaaaataatgaaacgcaaaataaagcaaaacacggttgactcttgaacaacatggtttgttgaactgtgcaagctcacttatgcttgtatttttctaaccaaacgtggatacaaaatacagtagtcgtgggacgtgaaacccgaatatacagagggccgacttttgtatgtgcaggactgattgcaggacttgagtatgcgtacatttcggtgtatgataggggccctggaaccaatccccctaagtataccaagggacaactgtacttttagttaacagaaacaaattgaggcttttaaaattaattaatttggccaggcacggtggctcacgcttgtaatccttgcactttgggaggccgaggcaggtggatcacctgaggtcaggagttcaagactagcctgaccaacatggtgaaaccccatctctattaaaaatacaaaaattggctgggcatggtggctcacacctgcaatcccagcactttgggaggccaaggcaggcggataatgaggtcaggagatcgagaccatcctggctgacatggtgaaaccccatctctactaaaaatatgaaaaattagccaggcgtggtggcgggcgcctgtagtcccagctacttgggaggctgaggcaggagaacggcgtgaacccaggaggcggagcttgcagtgagcagagattgcgccactgtactccagcctgggcaacagagcgagactctgtctcaaataaataaataaataaataaatacaaatacaaatacaaatacaaatacaaaaattagccggctgttgtggtgcatgcctgtaatcccagctactcgggaggctgaggcaggagaattgcttgaacctgggaggaaaggttgcagtgagctgagatcatgccactgcactccagcctgggtgacagagcgagactctgtctcacaaacaaaacaaaacaaaacaaaaaattaattattattattatttttttaaacagagtctcaatccggttgccctggctggagtgccatggcacgatctcagcttattgcagcctcgacttcccaggctcaggtgtgattctcccacctcaacctctagagtagctgggactacagtcacgcaccaccacacctggctagttttttgtatttttttttcagtagggatggggtttcaccatattgcccaagctggactcaaactcctggactcaagtaatctgcccgccccagcctcccaaagtgctgggattacaggcatgagccgccacaccagcctaaattgagggttttttttgtttttgtttttgttttgagacagagtctcgctctgttgccctggctggagtgcagtggtgcaatctcagctcactgcaatctccacctcctgggttcaaacgattctcctgtctcagcctcccaagtgtctgggattacaggcgaacaccaccacacctggctaatttttgtatttttttttagtagagacagggtttcaccatgttggccaggctgttctcgaactcctgacctcaagttatccacccacctcggcctcccaaagtgctgggattacgggcgtgagccaccgcaccaggctaagactttctttaaagagaatgcataaaatttttcctaaatttgcagcagagttgaaaatacttttaccttgagctttatcagaagaaaaagagtaattaatagtagaaaagagccaggagtggtggtgctcttgcagtcccagttactccagaggctgaggtgggaggatggcttcagcctggcagttcgagaccagcctgggcaacacagtgagaccccatctctaaaaactcaaaaaaagaaataaaaaagcccgggtgtggtggctcacgcctgtaatcccagcactttgggaggccgaggcgggtgaatctgagataggagtttgggaccagcctggccaacatggtaaaacaccatctctactataaatacaaaaattagctgggcgtggtggcatgcacctgtaatcccagctacttgggaggttgaggcatgagaattgcttgaaccggggaggcagaggttgcagtgagccgagatcgtgccactgcactccagcctaggcaacagagcaagactccatctcataaataaataaataaataaataaataaataaatagacacagacacacattcccacattcagcacaatggaaagggggaaagcccaagttggggagcttaagactgagctctactggtcccaaagccccaggcagcaatttcacttctgagtccacctcctcatctgtgaagtggaaggattctggcaccttccccagggactgggtgaacactgtaagccacaccctaggaagccctgagccagctggggctggacccacaggagcgctgatgaaagcccctgatggcacagggagaaaacagagcaagagccttgtaagcaccatggggaaagagaacagtggcgcccacacacagcagggacactgagtgcagaagaaccaagcccgtggcccacttaccctgcccaggacatcaagaggcagctttgagttcatgaggactggcttgactttgtctccagagagcaaaccattgatgggcaagaggctttcaaaaatcccatcaaatttggccttttcttccacctagttggaaagaaatagcccgagtaagtaggagagcacacctgtgtgaatgtccagaccgagctctgaccgaaagccaagtgaaaatggccacggacccatcatcacccttggctaaaagcacaaaatgatcttagaacagtcttggccccttggtttccaaagtgaacatataccctgaaggaaataacgttatggcaacctcggatctgggagccaaggtcctcaggagggaggccctggccccgggtcttgtccttcgtcctagctgctgcctgagtgtggcaggagtctcccatggtggggcagtgtctttgcagggagacaaagatcagtctcacctgcctccaaggagcccacttgtaccagaaagacaaaagtgtgagcagatgttagtgcttgagcaaataattatcaaaatcaacttaaagtacaggaagtcctctttttttttttttttttctttttttgagacaaaaatcttgctctgttgcccaggctggagtgtagtggcacaatctcagctcactgcaacttccgactcccaggttcaagcaattctcgtgcctcagcactcgtacctcccgagtagctgggatcacaggcatgcgccaccaggcccggctaatttttgtattttttgtagagatggtgtttcaacatgatggccgggttggtcttgaactcctggcctcaagtgatccgcctgcctcggcctcccaaagtgctgggattacaggtgtgagccaccaagcccagccacatacaggaagccctccatttctaatggtaaataaattaatacgtaaataggaatagctcttcatgaacagagggaaggtacagcattaggatggggagtcacagttcctgctgttctgaaagacatagggcaggcagcccgtaaaaggggccatgagtgaggcagtggcttccagtctgttccaccctccaaaggaaacttaacattcctgaactgtacacttagaaatggttaagatggtaaatgttacatgatgtgtctttcaaccacaataaaaattttttaatttttaaaagacaaaaaccaagacagagccctcagtcacagagatgagatcaccggcagacaccgcatgctttcacagctgttggtgctaagaagctgagcgctgcaggtctttctcgggggcctgggatcctctcctggccatcggacttgctgactcagtgccttcagaagcccagaaatgttcacaacggaaacaaacacttggcacttcgggcttgttctttctgactgtggctgtgaatggaatgcagaatctctctcgaccacagtacaccccaattacagcatctggtcctgtgctccctgactcctctctgcgaggtccccaggcccctcagtcccagctcttccagtgaggcctggacataacccctggtggaaaagagccatcacattttaaagtataagatctcttggcactgtttcccatgacaaagtagctctttttcaaagtccacacaatgcgctgggtgacagggagaaacccttcaccacagtgattgccactggcaaagtgcttgatgacagaggtgactgcatgactcctcagtcacatgacatatcttcatgtcctctccctgcacagatacccccacccagcccatgacctctccaagaagggagcaaaccaaccgtgtaaacatgggacgaaagtgcttgggacctttatttgagagcaagagtgttattcatgtcaggatttaagccacataaacgtgaggaaatgtgacagtctgaaagtgaagggaaggtgaggaggcctgatgttacttggagggaccatgctcacttcctttagaaggaattctgtacttagaagacagccctcgttttttttcttctttctggacgcagtagcttatctttccagccacaacatcctctgttttaaaaataacacttcaagtgctgagagaggcttttcacaaagcaatcagaacatcagggaggaaagaatggtaacatgcaaagtggctggaaagaagcgagaaagcaagggacacatttgggggtccacgtgcttgcaagctctcaccgtttcctcttctattctgaataaccaacacaagcagcaaaaaccacagaatgtgacctaaagatgcaagatttaaactgcagccctttaataatccaactcctgacacttagttgtccaggtaggcaactcccaattccagtgaagggccacagcctttgtaaaaggtgttcattagaagaggcgtttcatccaagtgctgtggccactcacactgagacagaagagctgacacaatcatcctataaaatgttctgaacaacatcaaactagaacaattccagaacaattctagaacaactgctggaacaattctatctgaaggagagccaaggagggagctattcccgttcacttaccctcacagcccagtgggcctctgcagagggcggtgtgaccatcagagggctgctggtgtcgtgctgagaagagagagaaacattcctttgtggctggcacagaattaaatcataggtgggtgggtttgctgaaaaggatacacgtttcaaagtgctttcaaaaaagggaagacttcacaaagttaaacacagaatcaccacatgacccagcaattccactcctacgtattgacccaaatgaattaaaaacggatgtccaaacaaatccttgtacatgaatgctggtagcagcactattcacaacagtcaaaagggtggaaataacccacatgtccagagagatgaatggataaagatgtggtccatccagtaaatggaatatggaaacactgatccattctacaacatggatgaaccctgaaaacacgatgctgagagagaggccagacacaaaagaccatgttagagaattccattgataggaaatgtccagaacaggcaaatccattgacagaaataaaattagtggttgccagcgactgggagggggagacaaggagtgattacttaatgtggatggggtctccttgcggagggatgaaaaagttctggagctagacagaggtaatgaagacacaacactgtaaatgcactaaataccactaaatagttcactttaaaattattaattttctattatgtgaatttcaccacaataaaaggggaaggctagagaaaacatggaaatatacatgcacatacacacatgcacatacacacacacacacatctggtattagaagaatgtgaacttgaaggacttggacactcacaaatttaggcggtggcatgctcaaattcagattgctcaaggtaacttcatggccactctgtgcacaggccaccagtctcagtgcaacatagaaaccctgcaagtccaaagaaagggaaggagtaaacagcatatcgccagtgagggtagggggagctgtctctaacagcaggcttcagggaaagaggatgtgcacttcaacaatgaaggccgtccgtgcaaaaaccccttggagcgttgggctgaactggactcaccttggggacatcgcttaaatgaatacactaaaatggacttatcctggccaggtgtggtggctcatgtctgtaatcctagcactttgggagaccgaggcaggtggatcacctgaggtcaggagttcgagaccagcctggccaacatggcgaaacctcatttctactaaaaacataaaaatcagccaggcgtggtggcaggtgcctgaaatcccagctacttgggaggctgaggcaggagaatcacttgaacccagagggtggaggctgcagtgagccaagatcatgccacttcactccaggctgggcaaaaagagcaaaactccgtctcaaaataaataaataaaataaaataaaatggacttattccactgcatctggaaatctgtaaaatttcagatgcatatattttccaaaaactatgagctcccaacatttaggaaatgttaggttgtataaagcaacaaaattaaacatggttaaggttacgaatgatggaccaaatatgtgccgaatttttgtttgttttagagatagggtctcactctgtcacccagagtgcagtggcgcaatcacagctcactgcaacctcaaactcatgggctcaagcgatcctcctgcctcagcctcctgagtagctgggaccacaggtgtgcaccactatgcccagctaagtttttatttatttttttagaggtgggatctcactatgttgcccaggctggtctcaaattcctgtcctcctgccttagcttcctgagtagctaggattacaggtatgagccactgcacctggctatgtgttgaattttttttaaagcagtcgtaaatacacacggttggtcagaaactcatatctgtggttcaccacgatcccctcggcctcgttgaatggaacatcccctgcccacccccagtggcctgacgtggaccccacctagacacgggaaggaagttgaactaggctgtcaggtgcctccctcctaacccaggacccaccacacaaaggctcagtggacttgtgagggatcacttagcttgttttttttctgtttttttttttttttattaactggcctaagaacatggatacttttaaagctataaatactgttaacagttttaaaagtgtcttcaaagaggtaagtgctaggatcggcctttctcagcctgctgtcctcagaagcccttgcagagtgtagaggatcataagagggttttgagaaaaggggacctttcatccctgcaaggtctgagaaaagagaaaaattaataaatagtaaagaaaaaaagaaaaaggaattaagtaagtttagaggaactgcattaagcaaagtcaaatttattttccataggaattctcagaacttttaacatgcagacatgaggccgggcacggtggctcatgcctataatcccagcacttagggaggccaagatgggaggattgcttgagcacaggagtttgagaccaacctgggcatagtgagacctcgtctctacaaaaaaaataataaaaattagccaggtgtggcagtgtgtgcctgtggcctcaggtacacgagaggctgaggcagaagatcacttgaacccagaagatcgaggctgcagtaagcagtgatcgcaccactgcactccagcctgggcaacagagcgaggctcaaaaaataaaaaataaaaaaacaaaacaacaaacatgcagacatgcaccatgaacctcaaagaagggaggtacaagtgaagggggcttcctggacagactggatcacaagtcatggcacagcacaaacaaggtcccttctaacaaaatggccatctacgaccacttaaaatcacttataagtacaggctgagtattcctcatcccaaatgcttggtatcagaagagtttcagatttcagattttttttttttttttttcagatggggttttcactgtggaggctaaggcatgagaatcttgtgaatccagagggcagaggctgcagtgagccaagatcatgtcactgcactccagcctgggcaagagttagactctgtctccaaaaaaaaaaaaaaaaaactctgattaaggcctttagtcaaagttacaccaatgtctactttgttacattaataacaccaatgtggctgggcgtggtggctcatgcccataatcccagcagtttgggaggccgaggtgggcagatcacctgaggtcaggagttcgagaccagcctggccaagatagtgaaacactatctctactaaaaatacaaaaattagccaggcatgatggttctcgcctgtaatcccagctactccagaggctgaggcaggggaatcacttgatcctgggaggtggaggttgcagtgagccgagattgcaccactgcactccagcctgggcaacagagtgagactccatgtcaaaaaaataaaaaataacaccaatgttattttctggctctgatcactgtgctgtggttatgtaagacaccatcactggggagagctggcaaaagatacacaggaaccctccaagctatttgtgcaacttccacgagagactggtccaaaataaaaagtctggacaacactttaatcacatgtaaggttacaaaacattaaaagaaaaataaataaataaataaataaaagatacactagccatgaaagatggctccaagtgtttaaaagacctttatttcaaaatgaaaacttcccgtgttaagtttgacagccgtgctcatgcctagtaatacttgacagtggaggaatgtggaaggagccgtggaggtcacccagcctgggggctctgcccagcccctccatttgctctgtgtacatgtgtatatacctgtttgtccaagaaccctttaccttctggatcggccaagtcccatatctgcggaaacacaaaaatgctcataagcatgactgccgatcactgtccacgtgttaacaaaaaccagagccgccaccaccccatcactggccttgcggggcaggagtgactgtccccaggttgtcctgcagatgaagaagccaattcagagcaggtgaatgatctgcccaggggcgcacagccagtcagcggcagggcccagaggacatccaggtgcactcagctcccaagccaatggtgtttatgacacccttcttcccccaactaaagtccgcaagtggccaagcgcggtggttcacgcctgtaatcccagcactttgggaggccaaggtgggcgattcacctgaggtcaggagtgcgagaccagtctggctaacacagtgaaaccccgtccctactaaaaatacaaaaaattagccgggcgtggtggcaggtgcctgtagccccagctactcgggaggctgaggcaggagaatggcgtgaacccagaaggtggagcttgcagtgagctgagatcacgctactgcactccagcctgggcgacagagcgagactgtctcaaaaaaaaaattagccgggtgtggtagcatgtgcctgtaatcccagctattcaagaggctgaggcaggagaatcacttgaacccgggaggaggaggttgcagtgagccgagatcgcgccgctgcattccagcctaggcaacaagagcgaaactctgtctcaaaaaaaaaaaaaaaaaaaaaagtccacaagctatcaagaccccaaaagtactcgggtttcttatctgctaccaaagtagtggtgggggctgccacctgggcatttggatccaccagctgcagcctgagaggtctgcagcgaccaggccactacccaggaggccgggccccatggaaggaggcctgcacaggctggccctgacctgcggggggagctgtgagggcagccacagaagagaaatcactattcatcttcacataccttcccaaggataatgtccgagaggccagacttctttagaaaaagcgcagcttcactcgcccccaccctccctgtgtatgccggatcgacctgaaatgggagaccaagaggcaaaataacttttcagcaaatgcagcagcaggtgaagtggcacccgccacgctaactatccgctgacagtgaacagaaaaggacaaaaggccgctcagccgggcttctattctgtactgtgctttcagctcaggcatgctctagttccatctgaagagacatcagctaaacttacctgcttgtaataagattcatacaacgaatttccagtgggaatctgtaaatgaaaccacagatattggtcaaaagtgaacacaaccccttggggaaaaaaagggttgccccctcaattttgtcatgaccaaaatatatgatgatagttagagtcaaaatgcatgcactttaaacatcctctgaacacagaattcagtttatcttcagacacagatattattatgcttacctgatttagaaaaagtaagcttaatgttctttaataaatcctgattctagggcaaacaatatagtcactcaggaaacagcagcagcagcccagtgtcaatttccattcactgagcaaagggatttcagctcctggagagctcagagggaaaggacactctatcctctgagattgttctctggctccggaatcagaaaagaagtttccacgcattatcataaatcaccaggcctgcaagctttcgaccagtttccctggcctgggtctggttctcaaccatcccatccatcctcctccagctacctgagtgctcagagacgcacactgaccagcccgcgcccggagagcgctggccagtaactgttcccaccagggaaggaaggaagtgcagtgtcctcagcttggcactgaagatattccatttcccgacacctcagagccccaagacatcgctgtttggaggtcacttccccatctagggtcacgcagctaatcggggccaccagaggccacacctggatccagcctggctggcggccaagtccagacacttcccgctgtgtcctgagctctgccagacgtctcccagggaaggggagggacacccaggggagtgtgccaacctggtggggaattatgcagtccctgaaatgctggctgtaaaagtttacgtgcgttggtgttttagtaagtgaggtgaaaaaagagcacacaaacctgccgctgatgtaataagcgataaaagtgaagaatgcacaatgacacctaattatacagaatggatgtgtaaacagctaaagagaatagaactgggcagggaaaagaggactatcttgggggcaggattacagtgtttatccaacaaattctgggactgctgttgtacgatttctcacaatgaataaaaccagggggacgtagactccttccagttatagtcattggatttgaaccaatacgcacccaccacttgcatattgttgtgctacaaagggtcatttgaagctaaaaataatgcccaggccgggcgcagtggctcacgcctataatcccagtactttgtgaggccaaggcaggcagatcacctgaggtcaggagttcgagacctggccaacatgacaaagcgagacaccatctctacaacaaatacaaaaattagccaggcgtggtggcatgcacctgtaatcccagctacttgggaggctgaggcaggagaatcgcttgaacccaggaggcggaggttgcagtgagccgagatcgtaccactgcactccagcctgggtgacaagagtgaaactctgtctcaaaaataaaaagaaaaaaataataatgcccggattatggtcagcgtctctgggggacgccaacacctgtgaatgtataaagaagtgaaagttgtaatcccaaacagcactttgggaggccgaggcaggcagatcacgaggtcaggagctcaagatcagtctggccaacatagtgaaaccccgtctctactaaaaatacagaaaattagtcaggtgtggtggtgtgcgcctgtaatcccagctactcaggaggctgagacaggagaattgcattaatccgggaggcagagattgcagtgagccgagatcgcgccactgcactccagcccaggcgacggtgcgagactccgtctcaaaaaaaaaaaaaaaaaaaagaagtgaaagtacagagaaaactaccatgacaaaatgaaaatagaaggaaaatagcataaagatctgaaaggggagagggaaaaagtcaaaaaaaaaaaaaagaggaaaagaaagggggaaacactgaaaaggcagaaaaaactagaataacatgaaaaagcaagaaaagccagagatttaggagccatcattttaaaacagacaaagacatcatggaaaagacataggaggtaagtgtgtatagcaacagcagccccaagatggctgcccccctcgtgcttggaggcagtgacaccattcctgggtgaggggtacaggaaggagtggctatcacccttagcatcttacaacctcgttagatgacagtgtccagccatcacacctgtgtcaacttctgggctcaaactccagcttatttccaaaatatgtctccccagaggaagaagacccacagaaaggaggccaaggcaggcaggctgtttgtcatctgtcagtaaaggtgacagtggtcaggtctaggcagcaaacagcacatcgcctgccatgggttcacagactccagaggccctcacttcagatgacaaaggtgcccttcctgccaatgatcagagaggtctggatctgaagcacatttccagacaagtttttttttttttttttgagacagggtcttgttctgtcacccaagctggagagcagtggcgcaatctcagctcattgcaatctctgactcctggattcaagccattctcctacctcagcctcccgagtagctgggactacaggtgcgtgccaccatgcccacttaatttctgtattttcagtagaagcgaggtttcaccatattggccaggctggtcctgacctcaggtgatccgcctgctttggcctcccaaagtgctgggattacaggcatgagccaccacgcccagccccaggcgagttttttaacaatctcatgggaagcaagggaaagaggtttccaagctactgtgattccagtggaaaaaaaagagtttcagtctttgaggcatgcagggttattaaatatctgctctacttcccaggcgctaatgagcaacaagatccgcaaccaagagaaacaaggcctggactaatccagaagagtcgctgaaggacacagcccagagctccaacctctgcccatccatgctaaaggctcatccggctcgaacacttgatgaccaccggatgtcactctcaaaagacctacagctgagggaaagcccagggagtatggctcaaccattgctcatcaccacgggagtccatctgggtaacctggaacaatgacagtggtcagaggttttgatctaattacacatatgtcaggttttgcatatgcaaaagcagaagggggaagaaagaaggtacagcaccaggccccaactgccacttcctcttatgccaggcttcttcccaggaacaatggactcacacctgcacgctgccctgatatgtcattgcgacagaactgaagacacatgttgctaatgacataaatccccagccccaggcagtctgtcactggcccctgtgcagagacctcttggcccccaaaaggaagattcacagctactgggaaagagccctctgtatgctgagagcagcctctggagctgcccacccatgtctgaccccaaagtgagcctggggccaagcccgaggcaacagcagagaggggacgcaccaggggatgaggcctgcaccgtaagaggctgcaggtggcaccaggatggccgtaggaatggaaggaagtgcagcagagctgacccgatgtgttctcctgacccagcccactgtgctgagaagacgccatcttcgcctctgcagtgtgtgaattgttgatgaggttcagtgtagctttcagctcggtctttcagttgctcttcctaactcaaaatgctaagagacaacatgcaaagttcctgtggcctcctcacttatcctccagcccagaaacaatttacaagtgggatgacagagagaggggcacaaggagaaggacaagttcacatccttctgctctgaaggctttaaaacaccgcaattcacacaagcgcctgtaactgtaacccaggacaacagcagttgagatggagaaacccagcagaaccacctcggaggagaaactgtctcaggattgtgttctaacgactcctaagcagggttcacccaactctgatccccgcacgtggccgagggcaggacgcctcctacatcttcatgcctggctgcctcctgcccaaactctcactctcactctgctagcaaagtacgcgctcttgtgcaaaacaaaccaatgatcatcagccttggttcaaaatgacttttggaaagcaatccattttcactgtaaaatgttcagagaagtacctataatcccttgtttcctatccagtacctctcatcctcccgacaacgctaaagggcaggtaatattactagtccagttgacaggtggggaaactgagtttgccctactcaggaccacaacagccaatgagcaacagtcagtgaagcacccaggataggtggtcctggagtcagaccctcacctactgtgcaccctgtaatgacagcccaggtgtcacagggctgtgcaccggaccacaggacagcctcatgcatatgctggcctgggaaaatgcacgtccgtgatgacgtgctggagcattttattaaacagaagaggtcaaaaggcaacactcaatttgagcatataaatggacttgaaagccagtgttttcgatgacctgccatttccccaggaaagctgagaccccataatggctatgtttttcaatgccactgccaagttttgcaggaagttaggcatataacactgaaacacatctcagtctgagttcctacttagaaaaacatatggatgcaaaaacatagcccggagtagagcttgcttgataatccttccatttctgccttccccttagaggcccccacaggccttgcacaaccatcacccaatgtgagcccagccctcccagcaggccggcccacattctgcgggtgagataacctggctcagtcatgtggcaagcacggggcagaactgggacttgactcaaaacattcaaaaggcatcagggaaacgctggggtatgtctaaccttcctggactggatgggcagctctctccaactgctccatcagaggtttctacagcagagctaaggtaaatgttaccaagagaaggagaagacttggcaagtgaaaagagagcttttccaaatcacaaggaaaaagacatctcaattaaaaatgagcaaagagagaggcaattcagaaagaagagatgcagcaaagttagaaagaaaatgttccatctcactagtaatttaagtattacagggccaggcactctggctcacacctgtaatcccagcacttagggaggccaaggtgggtgaatcacctgaggtcaggagttcaagaccagcctggccaacatgatgaaaccccatcactactaaaaatacaaaaattagccaggcatggtggcaggtgcctgtaatcccagttactcaggaggctgaggcaggagaatcacttgaacctgggaggcggaggctgcagtgagccgagatcataccactgcactccagcctgagcgacagagcaagacttcatcttcggaaaaaaaaaaaaaggcagagaagctaaaacaattctgaaaaagaataataaagtggaaagagtcagtctacctgatttcaagactgactctatagctagagtagttaagacagtggagtattggcagggggcgggcacagacagtaatgcacagaacagaatgtagaatctgagaaacagacacacacagatctgcccagtggatttcttgacaaaggtgcaaaagtatttcaggaggaaggaaagcctttccacaaagggcactggagcaatcggcatccataggaaaaacatgggcctcgaactaaaagtcttatgcctcgtacaaaatgtaactcaaagtggatcatgaattcaaatgtaaaacataatcctcaggatctagggcaaagcaaagagttcttagacttgacaccaaaagcccgattcacaaaaggaaagattggcagacaaactttatgtttgcactgtgaaagagccatgtaaggcctggcgtggtggttcatgcctgtaatcccagcactttgggaggccgaggcaggaggatcaccagagtttgggagttcaagaccagtctgacctacatggagaaaccccatctctactaaaaatgtaaaattagccaggcatggtggcgcatgcctgtaatcccagctactcgggaggctgaggcaggagaatcgcttgaacccgggagatggaggttgaggtgagccgagatcacaccattgcaccattgcactccagcctgggcaataagagcaaaattccgtattaaaaaaaaagggggggggagaaaggccgggcgcggtggctcacacctgtaatcccagcacattgggaggccaaggtaggcggatcacctggggtcaggagttcaagaccagcctggctaacatggctaaaaatacaaaaaaattagctgggtgtagtggtgtgcacctgtaatcccagctacccaggaggctaagccaggagaactgcttgaacccagcgggcagaggctgcagtgagccgagattgtgccactgcactctagcctgggtgacagagcaagactccgtctcaaaaaaaaaagccagataaaaaggtgaaaaggcaagctacagactagaaagaaaggtttgcaaagcacatatccaacaaatgactactatctaaaatatatactagagagctctcaaattcaacagcataaaaaagaaaacaatcaaattagaacatgggcaagccaggcatggtggtgcgtacctgtagtcccagcactttgggaggccaaagcaggaggactgcttgagcccaggagttccagaccagcctgggcaacatagtgagaccccatctctacatgaaattaaaaaactagccaggcgtcgtggtgcacacctgtagtcccagctactcaggaagccaaagcaggaggattgcttgatcccaggagttcaagaccagcctgggcaacataacaagatctgatttcttaaaaaacaaacaaacaaacaaacaaacaaacaaaaaaacacgaagaagaaaagaacatgggcaaaagatctgaaggcaaaaagacattttaccaaagaggaaatatagcagatggcaaataaacgtatgaaaatatgtttaacatcattagcaaaaagaagaatgcaaattaaaaccacagtgagatgccactgcacgctatcagagtggctaaaataacaaatagtgacaacatcaaatgctggtgaggatgcaggcaaactgggccactcatacactgctgatgggaaagttaaaaggtacggtgactctggaaacagactggcagtttcttaaaacaacaacaacaaaaaaaaactaaacacaacatgaaactaccgcatgaaccagcaactgtcctgggcatttacccgggagaaatgaagagtcatgttcataccacatcctgtatgcagtgttggccacagctttatatgtcactgctccaaactggtaacaccccggatgtcctccaataagtgagtggttcagcaaactgtggtccaagcacaccatggaatactactcagcaatgaaaaggaatgaacagctgacacatatgcaataatctggatgactctccagagaattatgctgaatgacaaaggccaaacctcaaaggttacatactgaataattccatcacataacatcattaaaatgataaaattgtagaaatgaacagagtggtggttgccggggataaggaagagatgggctgggagggaagtgggtgtggctataaaagggcaacaggagggacgtgttctgtacctggctatcaacaagaccctatctctacaaaaaaaaaaaaatagccacgcatggtggcacatgcctgtggtcccagctactcaggaggctgaggcagaaggattacctgagcccaggagttcaaggctgcagtgagctatgatcgtgctactgcactccagcctgggcaacagagctgtctcttaaaaaagaaaaaaaaagctttcaaaccttgattccgtgctctgatgccctccccagtccatgtcattcaccttgctgctttgctgaatgtctaaactctcaggggtggttctattgcttctcggttcctctccagggcagggaacgcatgccttacccctgtgtcatgccccactgcaggccctgagttctgtctgggctggacggaggccgtgagccccaggcatgtccatcttctttttttttttttttttttttgagacggagtctcactttgttgcccaggctggagtgcaatggtgcgatctcggctcactgcaacctccgcctcccaggttcaagtgattctcctgcctcagcctcccaagtagctgggattacagatgcatgccaacacacctggctaaatttttgtattttttagtagagacagggtttcaccatgttggccaggatggtctcgccctcctgacctcaggtgatccacccgcctcagcctcccaaagtgctgggattacaggcgtgagccaccacgcctggccagggcatgtccaacttctgctggtctcgcaaggtggtcatttgggtccccagagaatccaggactcttccttcagaacctgaacatagccatcatcatcaatatcccagatgcaatactgtaccaccattatgcaaatgttgcttcagaggaaactggataaatggtacaggctcttttttttttgagacaagagtctcgctctgttgcccaggctggatggcagtggtgcaatcttggctcactacaacctccgcctcccaggttcaagcaattctcctgcctcagcctcccgagtagctgggattacaggcacccaccaccgtgcccggctagtttttatacttttagtagagaccgggtctcaccacgttggccaggctggtcttgaactcctgacctcaggtgatctgcctgcctcggcctcccaaagtgctgggattacaggcgtgagccaccgcgcccgcccagactctccaacaactgcaagtgagtctaccatcatctcaaaatgagaagttttgttttttctttaaagacttaggaaacctaatgaccaaatgcaaggtgacatttgcagacaatcagggaaatgtgaatatggtcttgttatcagataataccaataccaaaggcgttattattagttgtgtaaggtgtgataaggcattgtggttatgtaaaggaaaacggtcttaactgttagaggtgcatgttgaaatacaatttcttttatttatttattttattttttttattttttttgagatggagttttgctctgtcgcccaggctggagtgcagtggtgagatctccactcactgcaagctccacctcccgggttcacgccattctcctgcctcagcctcccaagtagctgagactacaggtgcccgccacctcactcgtctaattttttgtattttttagtagagacagggtttcaccatgttagccaggatggtctcgatctcctgacctcgtgatccacccgcctcggcctgccagagtgctgggattacaggcgtgagccaccgcgcctggcctacaatttctaagattaaaaaaaaacaggccaggcacggtggctcacacctgtaatcctagcactttgggaggtcgaggcaggcagttacctgaggctgggagttcaagaccagcctggccaacatggtgaaaccctgtctctactaaaaatacaaaaaaattagctgggtgcggtggcgtgcacctgtaatcccagttactctggaggctgaggcaggagaaatgcttaaacccaggaggcgtaggttgcagtgagccaagatcacgccactgcactccagcctgggctacagagtgagacttcgtctcaaaaaaaaaaaaccacacaacaggaggctgggtgcagtggctcacgcctgtcatcccagcactttgggaggctgaggtgggtagatcacctgaggtcaggagttctaaaccagcctggccaacatggtgaaaccccatctctactaaaaatataaaaattagccaagcgtggtggcaggcacctggaatcccagctactcaggaggctgcggcaggagaatcacttgaacccgggaggcagagtttgcagcgagctgagattatgctactgcactccagcctgggcaacaggagtgaaattccatctcgaaaaaaaaaaaaaaacacaagccagagccaggtgtagtggcactcgcctgtagtcccagctactcgagaagctaaggcaggaggattgcctgaggccaggaattccaggctgcagtgagctatgatcactgggcctctgaatggctactgcactccggcctgcacaacatagcaaaatgtcatctgaaaaaaaaaaaaaaaaaacctaagaactaaaaatatacgtaggtgggggaaaagatcaaagggtggtacaaagaaatctgcaaaatattgataactgttgtaaatgggcagtgggtacatgggaattcattaaacccttccctctacatctattttatttttttatttttttattttttttgagatggagtctcgctctgtcccccaagctggagcgcagtggcacgatcttggctcactgcaagctccgcctccccggttcatgccattctcctgcctcagcctcccgaatagctaggactacaggtgcccaccaccatgcccagctaatttttttgtatttttcttagtagagacggggtttcaccgtgttagtcaggatggcctcgatctcctgacctcatgatctgcccgcctcggtctcccaaagtgctgggattacaggtgtgagccaccgcgcccgggctttattttatttttcatagagacagagacttgctctgtcacccaggctagagtacagtggtgccatcatagctcactgcagcctcaacctcctggacttaagggatcctccttccttagccttccaagtagctgggtctataagtgcatgccaccacacccagctaattactattttttattttttgtagagacggggtcttgctttgttgcccaggccagtctctaactcctgggttcaaaagatcttcccaccggggcctcccacggtgctgggattataggtgtgagcatgcccagccatcaacttttaatgtgtttaaaggccatttgggctgggcacagtggctcatgcctgtaatcccaacactttgggaggccgaggtgggcggatcatgaggtcaggagatcgagaccatcctggctaacacggtgaaaccccgtctccactaaaaatacaaaaaattagcccagcgtggtggcaggcgcctgcagtcccagctactcgggaggctgaagcaggagaatggcgtgaacccgggaggcggatcttgcagtgagccgacatcgagccactgcactccagcctgggcgacagagcgagactccatctcaaaaaaaagaaaaaaaaaatgacttatcgggtactatgttcactaccagggtgacaggatccgtattccaaacctcagcatcatgcaatactctcatgtaacaaatatgcacatgtactctctgtatctacaataaaaaaagctgaaatccaagaaagaaaaaagaattcctataaaaaaaaaaaaaaggccatttgatgtgcttctgccttggcaaggaccctaatggcacaagctgcgtcaggtttaagtgtgacaaatgaggagagcttggtgacaggatcgtgcttctgtgaaacaatacaaactggcattcctttagaacacacacaagtgtgccctaccatggctacaaggtctgctcctgggagactgagaagtgatgcaggagtgggggaagggtaagagggttcgctgttttccccccttgagggcacagatgcagactgcaaggcactggaaacagcagaggactggttaagctgctaataaattgctgagtctccatgggacagaataaataccttacagccatcaaaacagcagaatgtttacaaatggggtccaatcttcatcagcttgctaaatgagaagggggcaatctagcaggtgcagtgtgtgacctggcttataagcacacggtatcctatcgccccgctactggaacctggcgggacagggccatgcttaccaggatttctacgggccagctagtttgcttcctcatggcttcctatgttccctggtgtactatgtcagcatgagctgcttttgtaaattagacagaaatagaaagatgtgcaaggaaaagcaggatctgaaggaattttcatggattctccccagggacccaaatgagtgccttgtgagaccagcagaagacgaacatgctcggggctcaaggcctccatccaaaccagacagaactcagggcctacagtggggcatggcacaggggtaaggcctacagtcgctgccctggagaggaaccaacaagcaagagaactgccccgagcatttagacatgcagcaaagcagcaaggtcaatgacatggaccaggaaggtcgtcagaacacagaatcaaggtttgaaagctttcttttttcttttttttttttttaagagacagctctgggccaggcatggtggctcacacctgtaaccccagcacttttgggggctaaggtgggtggatcacctgaggtcagcagtttgagaccagcctggccaacatggtaaaagcctgtctctactaaaaatataaaattagccaggtgtggtggcgcacacctgtaatcccagctacttgggaggctgaggcaggagaattgcttgaactagggaggcagaggctgcagtgagccaggatcacatcattgcactccagcctgggcaacaagagcgaaactccatctcaaaaaaaaaaagagagacagctctgttgtccaggctggagtgcagtggcacgaccatagctcactgtagcctcaaattcctgggcttaagtgatcctcctgccttagcctcctgagtaattgggaccatagccatgcaccaccatgtgtggctaattttttttttcttttttttgtaaagattgggggggtctcattattttgccaggctggtcttgaactcctggcctcaagcaatcctcctgccttggcctcccaaagtgctgggattacaggcatgagcaccaaactcagcattccagaaacagaactgctggagaaaaaacattgcctgcagcaggcttcctgcctcgatgcactgccctgtggaggatgcaggactatgctgagccctaaacgtcttcaggagagactgcccagctccatctacacctatgggctgtgttctcccatcttgcttcactaagagaagctgtctcatgtggaggtcaacagtgctgccagacaaatgtggatttgagtcctgtcctgctgctggaatgctgtgcaaccctggggcaggacgagcagcctctctgtgcctcagcttctgcatctggagatgagggtgagcactcccacccccggggacttgtcaatcaccggctgttgtgattcctggtatcctcctcatcgccctccttccactggctccaggtaaaaatgtaccctctccccagaaacatccctccatctctcttccacctccagctactgacctccccccacccttcgcataaaacctcctgaaagccaggcgcagtggatcacacctataattccagcaatatgggagaccaagacgggtggatcacctgaggtcaggagttcgagaccagcctgaccaacatggagaaatcttgtctctactaaaaatataaaattagctaggcatggtggcacaggcctgtaatcccagctactcaggaggctgaggcagaagaatcatttgaacccaggaggcagaggttgcagcgagccgaggttgtgccattgcactccagcctgggcaacaagaggaaaaccctgtctcaaacaaacaaacaaaaaaccctcctgaaaaagggtccacccttggattccccagctctcccttctttggacctggaaatttatttgtttgctcactcaatcaacacatgctgaactcgtgctaagaggcagcactgaggatacaaaagtgtgtaggacagagtcctgggcttcaggccaggcgtggtggctcacgcctgtaatctcagcactttgggaagccaaggtgggtggatcacatgaggtcaggagttcgagaccagcctggccaacatggtgaaactctatctctactaaacatataaaaattagctgggcgtggtggcgggtacctgtaatctcagctacttgggaggctgaggcgggagaaccgcttgaacccaggaggctagaggttgcagtgagccaagatgatgccattgcactccagcctgggtgacaagagtgaaactccatctcaaaacaaaaacaaaaacaaaacaaacaaaaaatagagtcctgggcttcaggaagggcaggcgggacaaagtcagcccaggactatggcacaggggaccgcatgatatgactgcagcagtaggcacagtgaggggaactcagggcttggggccaggtgtgcaccgggacagagaagacaggtgagctgtgggtgattcagcacggccccagtcaggtggaagggcatgtgcataggatgccagggtctgtgcacgctgtgctgaaaagacaggatgtcatccccagggcaagcagaacatggggagggggtgcctgcaggccagcaaggtgggcgcatatgcatatgagatggtaaacggcagaaatccgctgcaaggagcagggctggaaggaagtgatcagagagagactgccatggccctccagcagcagaactccagcagcctggggactgcagcgactcacaatgcagacacccggagaaggaggacatgccagttccctaaaaacgaatgtgtttccttgggatgtccccaggggcattgaggtggaaatctaattgccattctagacaccttggtgcaggtgtggaggtgaacaacgggacattccccacccacagcctcatggagctgtgacaaagcacagagacggctgccaagagctagatggaagagacaggatggagggccagtccgcagccagcagcagacatacacccagggcaccaggagacctggaaggccccccctccatggctgagcctgtccagggagactcagtcaagcgaggctgtggagcacccgcaccaaagcagtgccagagacaggcttgccacggggagggagggaggaggctccaccacaggaaataccagggcagctgggtcctggagggatggaggggcgggcgtgtagggaagggctcaagggtcttgtgcagccatgcagagggcagaagggatggaactggaatggcgcccgggcaggaggggaacagattccagccctccctcctgaaaacgctgcttaagagcaaaagcagatgaagcctctgagcagccctcccagctgctgacctgtgtcccctggacatcacccctcccgggcatctcagagaacagacctattcagttccatctgtttccttcctctgacccatgagcggtctccctggagagacatgggagagcagtcacccaagactgggggggaggggggaacaccgagaggggctcaatgactcagcagtgtgtcctccgcagcaggaacacccaccgcctcccacaagggcccacttcccagagtctcccaactttccaaagtgtaccccgggccttcccaacattcctttcctgcatcagctactcctgggctccaatgtccctgccatctactactccctaacagagcacactgcccaggactcggttgggatgggtctggcctcctgtcggggtgttcctgacagtggggggtggctccctgccaaggacgccaagatcccctgcactggccaggtcagtgccatgccaccttcctcctcatcgctgtgggtgacagcgtcagcctcctagtgcactgttctttttctggcccctctaaacatcaggcacccctcgaggctcccggaccccacagtgagcagaaagatggttgctgccaccatggagcatcatagtcagggcatcaaagccagtgagctgacacacacaccaacacagaagagcaaatgcacagcaggggtgacaaggacaaggacaggggctctgtcctgatgggagggccgccccgcccccaccccgcttgccccatacatgcctctacagagcctggcccagcctcctcacccacggccctgccttcacccgcttccccactgcacctcgcacacagccactcctctgctcagaaaggctcttcagggtgtgtaacggaggctaaggtccaagccctgagcccagtcctgaaagtgctccctggccatctcctaccttgccgggctgatttcactccacacacacactcactcacacacactcagccacacacacatacacacaatcacacatgtacactcaggctcacccacatacactcacactcacatatatcacactcaagtctcacctccttcccccggctggcagagctctactgaacatatcgggcacctttcactccttgtcttggcacaagatgcagtcatgcatcgtttaactacagggatgcgtcctgagagttgcatcgtcaggttaatttcatcgtcgtgaggacatcctggagtgaacttacacaaacctagaaggcagcgcctgctccacgcctgggctgtggtctagcctattactcccaggctacaaacctgggcagcgtggcccggtacagaaaactgcaggcaactgtaacacaatgctaagtagctgcgtatctaaacatatctaaacatagcaaaggcacaggaaaaatacagcagtataatcttacgggagcactgtcacatatgcagtccatcatggttatgcggtgcgtgactgcattccctatgcttggggccgctgcctgctgcaggccaacgccctgctctaagatgaccctaggttcccccaaatgaaataagtccctcctgcctccacactcccatagccccaaactttgacaagggacacttcctgaagttgatttgatggaaaagctgctgtaatgaccggcccctctcactacattcttaatgcctggagggtggagggatcacgctgtgccctcctagaagcaggccttcagtaaatgtctgttgagggcatgggtgagattaaagtgttgagggaggcaggtggtgggctgagtgcaggaaggtgcagttggtagtggggagcgggcagacatagctctgtggctcagtagcagtgaggacaagccaccaagccaccctgggcctcagtgtccccatctgtaaaatgagaatagacagcacctggcctgaggatgctggtaagtcccaaatgagaatatgcaagtgaaatacactctgcaatgggaagccattattacatcccctattatggttactcttgtattattattcctgagacaggggagcaggccgtatttacaaagaatggtgggcggggagggaggtcaggcaaggctgtgaatcagcacgtgagttgcaggtgtaaaatcacagtccttatagcctgccctgccaattgatctttgccaagcaataaagtatttcaacaaatgttggctacactatggtacatatggtagccatttgctctctcaactcaacagctaagcagctcccaacatctaggatagaacaatatttcagtttgggaatggtggctcaggcctgtaatcccaacactttggagattaaggcaggaggatcccttaaggtcaggaattcaagaccagcctgggcaaaacagtgagaccctagccctacaaaaattaaaaatcagaaaattagctgggcgtggtggtgtgctgaggagcacctgcagtcccagctactaaggaggctgagacaggaggatgaacccaggagtctgaggctgcagtgagccgtgatggcaccactgcactccaacctgggcgacagagcctgtctctaaaaataaaaaaagaacagtgtttcaccaattctcttagtctcagctgtcattttcttaaaaaaaatacaattttacacacagcagataagtacacacctgtaaaaacccacttagtgtgaattaaaggacattttaaatgtgcattaaatgtgaattaaaggacattttctagtggctaagagtcaacaacaacaaattaaatcaataaagtcaactgactataaatgccaactcagaggctggcctaaaagaaaatgccaactccatggcctggtgtgagcaagcaaaataacagcaacaatttgcaccctggtgatggacaaccttgcccagcccatcagcaattgtggagcctgctcctccactccagaagcctcgacccacagagaaagtttccaaagccagcacgggggtgccgcgggcacagagcgttctagttctcagcaaagaaaaaactcaaagggaagaacgtttgcaagaacatgcgcctaggccaatcgtgtctgggaccccccaaccacaaacagtgccatttgtagggtgtggggggaattgagggggacagtccatccccataaccgtacagtcctggttaaacacgctcagtgtgagggcctcatcatcaagttttttcgtgtttcatctttcccctttggagagtgtgaaatgagatagttttctcttccactggaaaatataaaattgaaaagcacgtcctcttcagattaagaaaagccagctggggccaggcgcggtggctcacgcctgtaatcccagcactttgggaggccgaggcgggcggatcatgaggtcaggagatcgagaccatcctggctaacacggtgaaaccccgtctctactaaaaatacaaaaattagccgggcgtggtggcaggcgcctgtagtcccagctactcaggaggctgaggcaggagaatggcatgaacccgggagacggagcttgcagtgagccgagattgcgccactgcactccagcctgggcgacagagcaagactccgtctcttaaaaaaaaaaaaaaaaagaaagaaagaaaagccagctgggcatagtggctgacacatgcaatcccagcactttcggaggccgaggcaggtggatcgctttgagctcaggagttcgaaactggcctaggcaacatggagaaaccccatctctacaaaaaatacaaaaattggcagggtgtggtggcatacacgtgtggtcccagctactcggagggctgaggctggaaaatcacttgaacccaagaggcaaaggttgcggtgagctgagatcgcgccactgcactccagcctgggtcacagagtgagactctgtctcaaaaaaaagaaagaaagaaagaaagaaaagccagttttctacagattggcgtaatgacagaggcacacttgttgatgtcacttacacaagaggaaagccctttcctcaccctctgatgagcggaggtgaggaggtagcagggccccagccctggtggtgccctgactgctgtcaccggccagtgggctcgagcaggcggctctgggccctgtgcctgtttcttcacccaagagacaaaacgttcccttctgtcaactaccctcaaagacagctggagagacagactgcgctcctggctgctgttccaagtacccagcctccaatcaacagatatcaccagcctactatgtgccaggagcccagatttcaggggctgggaacccagcagggagcaggaaagacagagctcctcgaccctcccggagcccatggtgtggcaatcataggacaaaatggtggctttggagcccatggtctgattcagacgcctgttctccatgggggtctgaccagttgttttacctctctccctctcagtttcctcatctagaaacaagcacagggacaatggcaccattgttggtcccacaacattccctcactcctgcatcagacctgtgccccaaatctctccccagggcccagagctgcctgcctgggcccactcactggtgagggcagtcagggtaccaccagggctggggtcccgttgccacctgttctgggagaccaggttaccagaatcagggaagtgggggggagggcatggtggctcacacctgtaatcccagcactttggggggccaaggtgggtggatcactagaggccaggagttcgagaccagcctggccaacatggtgaaaccctgtctctactaaaaatacaaaaatacaaaaaaattagccaggcttggtggtgtgcacctgtaatcccagctacttgggaggctgaggcagaattgcttgagcccagatggcggaagctgcagtgagccaagatcatgccattacactccagcctgggtgacaaagcgggactccacctcaagaaaaaataaagtaaaacaaagaatcagggaagtgggactctgagaaggcagagagggggccaggaagctgtgaagatggtggtgggagacagggcctgtgcaaagggtgggggcaggacactggtccacgcagtgtacagccagtcagagaggctgcacccagctgcttcctccaggcctgttggaacagaggagggaaaagacaaaaggaggcacaggcgccctcttcctcctgtcctttattcccagcccagtggaggtgattcatcccaccgctgtgggtgccacctgacttccacgagtgtgtcacactatgtcctaattttctgtgtgcctgggtgcccagctgcagttgagctgacctggagggtggggctcggttttatttatcttggtcccaagacagcacacagtagctcagcagacagaatctcatggtgccccagccccagagctggtcttctttttgactgtacctaaatgtggggtctcacgtggcttggagggtttcctgcaaagtgatgggttttgactcaactgacacagccacagcccaccaggctctgcccaccaggcactcccactgctgctgtcctggctccctgaaggtggcctcaacctgacggttgcagacactatgcctgcttcttccccctgcttcctctcccacctagaccctcacctgtccaaacagctaccccacatattcctttcacccccagccctttctactcttcctgaaacaacctcaggccaggttcctcttgatcacttcatgcccatatcacagagactgtctcggagctagaacccagctccaagcactccctgtgtaagcagccagatcatctaaaggtgtcactcctcaagaacctgccatagctccctactgcctctcataatgtggcccatgctactcttccctcaacagatgattgttgagcacctgagtgccagctgcagcctggcaaacaaggatgaataaaacaggcacagtctctgcccttgtggacctagtctaggtggttggggaagacagaccatcaatcaaccccgcaaagagaaaattataaacggctaaatggaaaaggtgtccatctccaccagtggtaacagagatgctgggccagtttgtcaggaaaggcttccctgaggaagtgatgccccagctgatatgaaaaggtgtagggattcaccagaggatgaagggtttggaaagagcattccagagagagggaatagcagatgcaaacgccttgaggcaagatgaaggatcgcctgcgcagatgacagaaagaggggccagggggccacagagcagagggaatgaggactgcaggcctgggaaacacggggagcaggtgtgctgtcagctgccggtagcagcgcctgatccagcctggctggtgtgcccaagaggaggagaagtgactttatgtcagcctgacctgcaggcagtcagtaaacagattctgttatcaggtctacattccacaccacaggcagtgcagatggaaatccgagacaaatgtctgtggtcatctgtgacctttactttcaccccaaagcttgtagtatcaagagctgggactcctatgaagggaaaagcccaaagaagctttaagagctaatggtctgcactccatgcaggagcaaacttcagggccaccactctgaccagcggtaaaacccagtccagcgcgaaggacagtgggcaggtctcagctcctcagcccccaccagccactggccactctctcggcaagcagacatcctgtcagttcggccgatttgtagcccagacacaaactctcacgtcttatttaccaaaagaccttcctcctctcatccctgagctgcctaaattaaaggaaggacatgaaccccaaagtcccagccgcatgttttggccctttgacctagacctgcagcctctcagctctggctcagtcctctttgcctccgtgtgaaaggctattccccatggcctagaccaggggtgtccaatcttttggcttccctgggccacactagaattgtcttgggccacacataaaatacactaacactaacactaacactaacactaacactaacactaatgatagctgatgagctttaaaaaattcacgggtgggcatggtggctcacgcctgtaatcccagcactttgggaggccaaggcgggcagatcacaaggtcagatcgagaccatcctgcctaaccagtgaaaccccgtctctactaaaaatacaaaaaattagccaggtgtggtggcgggtgcctgtagtcccagctacgcaggaggctgaggcagtagaatggcatgaacccaggaggcggagcttgcagtgagccgaaattgcaccactgcactccagcctgggcaacagagcgagacttagtctcaaaaaaaaaaaaaaaattcacaagaaaacctcataatgttttaggaaagtttacaaatttgtgttgggctgcattcaaagccatcctgggccacatgcagccatgggttggacaagcttggcctacaccaaacacgccctctcctccatacaaccatgtccaacacccaaatggaagccagtcatctgcccctcctgcagcttggaccacccgtgacctgagcctctgctgtgggccgggcctggacaactcaattctgcatgggccaggagcactgattaccactctggcagggaaacctttggattctcctaaagacaactggctgggagtggtggctcacacctgtaatctcagcgctttggaggcagaggcaggaggatcacttgaggtcaggagttcgaaaccagcctgggcaacatagcaagatcctgtctctacaaaaaaattaaaaattagccaggtgtggtgttgcatgcctgtagtctcagttccttgagaggctgaggtgggaggctcacttgaggccaagagtcgaggctgcaatgagctttgattgcaccactgtactccagcgtaggcaatagagcaagagcctgtctctaaaggaaaaaggaagacaataagcaggcctttccatgtccctctctaccttttaatgagatgagattaaagtaataaaataaaaactcagactacatgatatctaataactaggtataaaaacaaatgaggttaggagatgtcataaacttaaaaacaaacaaacaaaaaaataactttccaagacaagaaactatggtgcaatgaagaggcctgaacctgtgtcagaaaagccatgtctgcctgagctcactgggtacaaacttgggcaagggacgtaacaatctctggcctcactttatctattttttttttttttttttttgagacagagtcttgctctgtcacccaggctggagtacagtggtgcaatctcggctcactgcaacctccacctctcaggtccaagcaattctcctgcctcagcctcctgaggagctgggactacaggcatgtgccaccacgcctggctaatttttgtattttagtagagacagggtttcagcatgttggccaggctggtcttgaactctcgacctccagtgatctgcccttcctggcctccagtgatctgcccctcttgcccctatacactgaagataatactggccagagtgaccgggaggatgaaccaggcaatctatgatgttttctttactcagtccttccagcctggtggtgagacctttcctgacctccatcatcagatcggaacctgccctgctctactcatctcacagcatcaatccccaccgaatgcactacacattgggctcatttctttatatctgggcccctcccaacgatgtcagccccgtgaggcggcactgccttcagattcactgttccatccactgcccagaaagtgtccagcaaaaagaagatgccaaataaatactcactgaacgaacagtgtgatctacaaaaggcaggcatgagggccaggcgcggtgcctcctgcctgtaatcccagcactttgggaggctgaggcagacagatcacttgaggtcaggagttcgagaccagcctaggcaacatagtgaaactccatctctactaaaaatacaaaaattagctgggtgtggtagtgggcgcctgtaatcccagctactcaggaggctgagacaggagaatcgcttgaatccaggaggcagaggttgcagtgagccaagacagcgccattgcactccatcctgggtgacaagagtgaaactctgtctcaaaaaaaaaaaaaaaaggaaagcactgagagcacatgcgtcacacggcagggtcctgacactctactgtgacaaagcaggtcaagcgagtccacagtaccattctgcagatgagaaaactaaggtacagaaagtatttgcaggactgagggcagtgaaggaatatctgggaatccaaacaaacatctaaggacctaaacattgaaaagcaggcaccactgcacctgatggtgcctgcttttcttttcttttttttttttttgagacgtagtgtcactttgttgcccaggctggagtgtgcagtggagtgatcttggctcactgcaacctccgcctcctgggttcaagtgattctcctgcctcagggtcccgagtggccgggattacaggcgtccgccaggacgccaggctaatgttttgtatttttagtagagatgaggtttcaccatgttggccaggctggtctcaaactcctgacctcaggtgatccacctgcctcagcctcccaaagtgctaggattacaggcgtcagccactgcacccggcctggaaagttgttttaaagttcagaatggaggtggaggggtcttgcccagggagaatctatttagtcgaaaaaacaacaacaacaacaaaaacaaaaaaaaaacaggccagtgcaggtcaataagtgacagtcagggaattctggatctttcaggagtggattttactctaaaacttcgttctcatcaatttagactgcattgccattagcattctactaagatagactagcacttatttcagaggaagaaaagaaacaagggacaagaggacaagtaagtgtccgagccactcagcattcattccagacacactggccgggtgctgctctgggagaggtgcccagcaggccatctggaacagcagggctctgcggcaggaggacgcaggtgtgacctcagctctgcgcccaccaactatgagacttcagcaagttactctatttctgtgggtcttggtttcctcacttgtaaaaggggaataaaagcctcctagaatggaggcacctactgaaatacagcaaaagctcctggatgaagaacacataacaagggggaaaggaggaaggtgtagctctttgggcccagggcagtctctcctcatcactgagcccagttaccacgcgcttcctaggtacagcggtcacaaaagggacccacggaaggtacaagggagagaactctcattcgggtggggctaagggaggacaacacaggggaggcctcaaagaccgtccttcagggcaggcagcatacggcaggagctcacagtgatgttctagcaaccggagcaacacagctaaggatgctgaggctagaaagtgttgccaagagccagaagtgcaggaaagggacccagcaaggttaggtggagtcgattcagggcttactaaggtcatcaaagctgactttttttgagactgagtctcaccctgttgcccaggctggggtgcagtggcgcgatctcagctcactgcaacctccgccgcctggtttcaagcgattcttgtgcctcagcctcccaagttgctgggattataggcgtttgccactatgcctggctaacttttgtatttttagtacagacagggttttgctatgttggccaggctggtctcgagctcctggcctcaagcaatccatccacctcagcctcctaaagtgctgggattataggcatgagccacagcgcccagccataaactgagttcttttggaggaaggggaatgggagctgtgaaaggtttttggaacaggggaatatgttttagaagatgaatcctagccagatgcagtggctgacaccgtaattccaatactttaggaggctgagatagaaggattgcttgaggctaggggtttaagacctgcctaggcagcatagcaagacttcatctcttcaaaaaaaaaattgtttaattagctgggtatgattggtgctgcgctcctgtagtcccagctacttgagaggccaaggtgggagaattgcttgagcccaggagtttgaggttgcagtgagctatgatcctaccactgcactccagcctgggggacagagcgagaccctgtctcaaaaatcaaaaagatgacttccacagtggcgtgggattaagtgggagggagtgggcaagtaggaagtagaatggcccagaccactttggggcatggcaaggaaatggcccattccagagtccagcaggctggcagaggtgcaggagagagacaccttctggactctagaaggcaggtttgaagtcctctgcacagaagctccaggggagggagcgcacagagagataagatgcaggtagggaggctgaaattaggggacaagaaggagagactgaaaggagagaggatgaagagtgaagaccgacgggctccagtgttgcggagttcgaggaggatcggctgcagccacagggcaccggggttaaggacggaggggccaccggtaacctcggggagtacaaggaggaaagagatctggatgcatttccacggaaggctttttggaaagcagaagagagctgagcagggggacagggagacacacaaatcactgagatgctgttgggaaaaaaaaatcactcctaaagaggcagaggtgcagacctttcgaatttacgttgatattcagggtcagaaaagagtatataaggaaggagattctgagatgatgtcatggagtacagaacagactgaaaaagatgctgatgggaaaagtgcagacaggagtgggggtggagaaaacacacccctcctcccctaggctagcccgctgggttatccactttgctcaccttcacctggccatctgcttgccaagtgtgctctgtcacctaaatccaaccagatcacagccacctgctgcagggtgcttcccttttgcccccaaccaaaaattttggaattatacccttggttcccccagagttatctgtgaacccaagtgatctcctgagctagacagtaagggcctgggagggccatgcctcacacctgggccaacagtaacccatggtgtagattttcactcgagagcaagtgtaaagaagtgctgacatttccaaacgaagaaaaccaggccacgccttcattcaacaaatgtatagggaaaggaacaggaagaggctaagaagtcagtgacctggccaggcgcagtggctaacgcctgtaatcccagcactttgggaggccaaggcgggtggatcactcgagttcaggagtttgacacgagcctcgccaaaatggtgaaaccccgtctccactaaaaaaaaaatacaaaaattagccgggtgtggtagcacgtgcctgtagtcccagctactcaggaggctgaggcaggagaatcacttgaactcgggaggcggaggttacagtgagctgagatcatgccactgcactccaccctgggtgacagagcaatactccatctcaaaaaaaaaaaaattggacaggaagttttagaaagatccacgcctcccaaactgggagtgcttagtgctttctcatgaaatgatcttaggtgattttcccccgactcccgccttccccgccccccaccccctgactacatactctaaactgtagcacttagctattaacacctattatcggtaggacacttaacagtttacagagcactttcatgtcagtaacaagaacttgctaattaataatcaccgggttttagcactgttaacttagtgacagtgttgcaaattggctagctgtgcacttctctctccttggatcagctaaccagtcatgcaagcatgcaaccggcctatcaactctctttgggtttggaattcttaattgctgcggtctctactcccaaacgtccaaatctggcagagattaaatgatgacagtaattataggatcactgagtgcctctcatatgctaggcactgttctaagcgctttttcacgtgcttaattttcacataatcccaacacatttttatatctccattttccaaaggaagcaactgatgggtggaatggctaagagcttcaaccaaaggcacagagaaatcggggctggagccaagatttgaacacatgatctgaccctgtgtcctcactcttaatcaccatgctgtgctagatcattctagcaaaatgcttatatggtgctttgcacaacacaggtattcagcaaataaaggcagctgtgattagcataacacaggtagtttctagttcccacgagtgtcacctccaggaaagcagcgaccttgtctgtctggaagaatgcagcgctcccagcacctgacccaacgcacatttgagggatggatagaaaatgaatgaatgaaagtctctcccaaataacagagctgcctacgcatggctctttttcgcatgtctgtgtcgcgctatcgatactgccccttcataagcgcatcaggcgaatttgaggacacagagaggcgcccggagacgtacgatctgcgcccggtgcaggggtggcggaagcagcttccaaggaggcaggggatcagtctgagatcgcactgctgctgacgggtccgggctccggcgggaccctgcccgcccgggcgccgggaccggagggagacaaagactcgctgggccgccgcgccgacagaaacgctcgcacccctcgcccacccctccgggatgcagcccagcgcctccgcgggtccccggcctgggagcttcagcggcggcagggtccgggccctgggcggagaggacacgcgctgcgcacctcctcgcctcgccggtgcccgcgagggtcgctcgggcacgggaggccgcgggtcccggcctgtcaccttcagggccgcctgcccacccgcccgccgcaagcccttcagcacgcgccgcccccgccgccgcctggctgagtctcccagcgcctcagcctcgccgcaccgctcgcctcgcgccccgcaccccggcgccgcccccaggcccgcccggcccgtacctgctgggagagggggatgagcggcgccgccatcttcccgcggactcgggctccgagcgccgggggaacgggggcggggctgcagccacgcgtgcgcactgggacgacgggagggcggtgcgcaggccgcctgtcccgggagagggcggggccgtagacagggccacgcatgtgcagtcaggccgggaggggcgggggcaggggcggggccgcccacacgcagcctggaggggctgggcctgaggcatctgcgtcttccgtgctctcttgcccgttcccctactcctccttccaacgttgttcggactctcatgccgctggccgctgtccgagtcgaccatgctgtgtcatccctccagcccatgccgaggcctggttctctgttagggatgccgtccccctgccagtgcgcctggggaggcggtcgcccaccccgcggagggtcgggaccctcaccctgccccgcaaagcgccctgttcctaggatcgcagtgtgtgtgtgtgtgtgtgtgtgtgtgtgtgcgcgctaatttgggggacccgcaccctgcccccctcaccctgccccgcaaggcgtcctcctggctgtggtggcgggcacctgaaatccaagctactcaggagactgaggcaggagaattgcttgagcccaggaagcagaggtttcagtgagccaagatcacaccattgcaatccagcctgggcaacagaagcgaaactctgtctcaaaaataaataaataaataagacaagaacccacttgttgccaggtacagtggcttacacctgtaatcccagcactttgggaggccgaggtgggagggtcatgaggtcaggagttggagaccagcctggccagtatggtgaaacatcaatatggtgaaaccccatctctactaaaaaaaatacaaaaattagcaggtgtggtggtgcatgcctgtagtcccagctactcaggaggctgaggccagagaatcacttgaacccgggaggtggaggttgcggtgagccaagattgcaccactgcactccagcctgggtgacagagtgagactctgtctcaaaacaaagtcaaaaacaaaaagaacccacttgtaactgttgctaatcaaagcatacattcagggcaacttgaatctgtgtctcctggactgcggtcctcaaccttggcccaaactctctacttatattaactttgcctcagcttcttttgttacatcaatagagtaatgaaggtttttaacagtcttgagtgctttatcagtacgtattccataaggaaaagagaagtccttctaggtacttcaaacagaggatattgaatacaggggattgagccaggctctgtggctcacacttgtaatcccagcaatccagttgagacaggtagattgataccagcctggccaacatggagaaaccccatctttactaaaaatacaaaaattaacccagtgcagtggcaggtgcctgtaatcccagctactcaggaggctgaggcaggagaattgcttgaacctgggaggggaaggttgcaataagctgagaactcaccattgcactccaacctaggtgacagagcgagactctgtctaaaaaataaataaataaaaataaatgaatacataaacgactacaggggactgagtataaaagtgttggaagtactggaagaacaaaagaggaaggtaagtttacctaaagattcataactatatgaggctgctagcctctctagagctgaaagattaaagcaggggaggtggctgggcatagtggctcacgcctgtaatcccagcactttgggaggccgaggtggatggatcacctgaggtcagaagtttgagaccagcctggccaacatgatgaaatcccgtgtctactaaaaatacaaaaattagccggttgtggtggtgggcacctgtaatcccagctactcgggaggctgaggcaggagaatcacttgaacctgggaggcggaggttgcagtgagctgagatcacgccactgcactccagtttgggcaacaagagcgaaactccgtctcaaaataaataaataaataaagcacaggaggacccataacccacaatcactgtgcctacagaaggatcccagatgtgttcacccttgctagccacagttgcctccaccatgattgcgaaagtcacagttgttgttgtcaccaccacctaagccactggcagaagtctgaaaaaatggtttctcccctctttctgcctcccaactttgttctaataaagcatgacaggaacgttgccaattggcaacggcgtccaggaaatgtagcatgcaggctttaagtgccagtatcagagtctagaatggtggtggccatagaaactctccagcatcatcttgtaaaaataatccaaacttggctgggcgcggtggcccacacctgtaattccagccctttggagggccgaggcaggcagttcacgaggtcaggaattcgagaccagcctggccaacacagtgaaaccccatctctactaaaaatacaagaattagccaggcgtggtggcgggtgcctgtaatcccagctactcgggaggctgaggcaggagaattgcttgaacctgggatggggaggttgcagtgagccaagatcgcaccattgcactccagcctgggcaacaagagcaaaactccgtctcagaagaaaaaaaagaaaaaaaaaaaggccgggcatggtggctcacgcctgaaatcccaacactttggaaggccgaggcaggcagatcatgaggtcaggagatcgagaccatcctggccaacatggtgaaaccccatctctactaaaaatacgaaaatttagccgggcatggtggggggtgcctgtagtcccagctacttgtgaggctgaggcaggagaatggcatgaactcaggaggcgggtcttgcagtgagccgagatcgcgccactgcactccagcctgggcaacacagaaacttcgtctcaaaaaaaaaaaaaaaaatccaaacttaatcatacacttttgaaccctaagaattatgttgagccttgaagaaaacgggactgtgtgatctgagccagacagcatgtaactacaacttctgcttatagattatagattaactctcctgttcttgctctgtagattcatttcaagactaaatggcatcagcgttaagatcgcccttcttcattgctgacctttcctctattatcttgcacctaaatcagaccagatagtgcaaaaggtcctgtgactgttatgtcctctatgtgaatgttaaatatacccttcccaaaaagaccactgccttgactaatcagattactgttaactatgtacttgccttgtgtgaaatatgtagaaacgctgtcaagcttcccaaaccttacctatataaatgacccccaaacttcctcagtttggaatgctgatttccattctttggaatctgtgttccagggtggccgtcctcaaacttttgtgctaaactaaactctatatttaaccatatttcctgaatttatttatttagggttgatgttttgatgatccagatgggatctgaagtggagttccagtgatccctgccacttctcacaatcagaccctttgtactgttaccgcaaaggggtcttgatccagaccccgagagggttcttggatctcacccaagaaagaattagtgcgagtccatacagtaaagtgaaagcaagtttattaggaaagtaaaggaataaaggaatggctacttcatagagcagccccaagggctgctggttgctttttttttttgggagaagtttcactgttgttgccagggctggagtgcaatgacgggatctcagctcaccacaacctccacctcctgggttcaagtggttctcctgcctcagcctcctgaatagctgggattagagacatgcaccaccacgcccagctaattttgtatttttagtagatgtggggtttctccatgttggttaggctggtcttgaactcccaacctcaagtgatccgcctgcctcggcctctcaaagtgctggaattacaggcttgagccactgtgcctggccaggttgctcatttttatggttatttcttgatgatatgctagacaaggggtggattattcatgccttccctttttacttatttatgtatttatttatttattttttgagacggagtctcgctctgtcacccaggctggagtgcagtggcgcgatctcggctcactgcaagctccgcctcccgggttcacgccattctcctgcctcagcctcccgagtagttgagactacaggcacccaccaccacgcccggctaatttttttgtatttttagtagagacagggtttcactgtgttagccaggatggtctcgatctcctgacctcgtgatccacccatctcagccttccaaagtgctgggattacaggcgtgagccaccgcgcccggcccccttttcaggctgccatatacagtaacttcctgatgttgccatgacctttgtaaactgccatggcgctggtgggagtgtagcagtgaggaccaccagaggtcactcccatcactatcttggttttggtgggttttagccggcttctttactgcaacctgttttatcagcaaggtctttagtgctgacctcctatctcatcatgtggctaagaatgccttaaccgcctgggaatgcagcccagtaggtctcagccttattttactaagcccctattcaagatggagttgctctggcagctacctgatttatgaattgttctttgctcagttacactccatgaaatttaatatgtccagagtttttcctctaacaaagtttaaagtgaagttaactagaatgaaataagattaaaaagtcatttcttggtcccactagccacatttcaagagctcaatagcaacacgtgacccggcatggtagctcacgcctgtgatcccagcactttgggaggctgaggcacgcagatcacttgaggtcaggagttccagaccagcctggccaacatggcgaaaccccatctctactaaaaatacaaaattcagatgggcatggcgcatgcctgtaatcccagctacttgggaggctaaggcatgagaatcgcttgaacccaggaggcagaggttgcagtgagccatacttgcgccactgaactccagcctgggcaacagagcaagattctgtctcaaaaacaaacaaacaaaaaaagcaacatgtgacaaattctctcggacaacgctgctcccaacgaatcttcagagcctgagccagtctcactcaccgttttttgtcttgttagctccactttattttatttttagagagggggtctcgctctgtcactcaggctggagtgcagtggcacgatcatagcccactgcagccttgacctcttggactcaagcgatcctcccatctcagcctcccaagtagctgggaccacagtcatgtacctccatgcccagctaattacaaaaaaaattttttttagagacaaggtctctatgttgcccaagctggtctcaaactcctggtcttaagtgaccctccctccttgaccccccagatagctgggattacaggcacaagccactacacctggcctgactcacctttgtacactaattggtaccagcactttctctccaggtctgcctctgattcttttcacactactcaccctgttcagaggtgaaagaggtaggcaatgtttgccacccttgcattaggaggaagggagtctttagtttctcagagtaataatcaatccctaataattggtgaaggttgatgtagccaccatcagaaaaaatccaggtgcaaaggtctgccaacattgaccagagtgagagcaaaattctgcagaacttcacttcccagccaggcttttgaaactgatcaactttcttttttttcttttcttctttctttctcttttttttttttttttttctgaggtagggtctcattctgtcacacaggctggagtgcagtggcacaatctcagctcactgcaatctccacctcccaagctcaggtgatcctcccatctcagcctcccgaatagctgggaccacgggtgtgcaccgccaaacccagctaatttttagtattttttgtagaggcagagtttcgccacattgcccaggctggtcttgaactcctggactcaagcaatttacacacctcagtctcccaaagtgctgggattacaggtgtgagctactgcacccggcccacactggtcaactctcaatattctgtatataaattccaatttatttggcttattcataacatcactagattccaaatttctggtgtcacaaatttgattattttcatcatgagtttcagtatgattatgggcctcttccagaagaagactgggccaggagcagtggctcacacctgtaagcccagagctttgagaggccaaggtgggaggatggcttgagtccaggagttcaggaccagcctgggcaacatgtgagactcccatccctataaaaattaaattaaaaaacaaaaaatatggctggctgcagtggttcatgcctataatcccagcactttgggagaccaaggcaggcggatcacgaggtcaagagatcaagaccatcctggctaacacagtgaaaccccatctctacttaaaatacaaaaagttaaccgggtgtggtggcgggcgcctgtagtcccagctactcaggaggttgaggctgcctccagcctcagcctgaagtacctgggactacaggtgcgcaccaccacatccagctcctttttgtatttttagtagagacgggttttcactgtgttggccaggctggtcttgaactctgggctcaagtgatccgcccacctcagcctcccaaagtgatgggattataggcgtgaggcacactgcctggtcaacttttattttataaaaagacttttgggagttaagaaaaggggatcatggttttggccagacccttgctggcctctggcttccagtgtgtaaaattgtcaagagggaacttctcagtgcaagggggtcaccaggggagatacaacctaccccacccagaagcatgaaacactgttcaaagaaaattggacaaagtgccatgtagacatttgagtttgaaacatagattaaagtagcaatgagattttaccagtcatccttatatccaatggggatcactaaagttcattccttctgtgaaattgattgaagtaatgttcgtgcctgttaatttttcccgacagcagctcttcctcctcttcctcgcgggccttcttcatttcctccttggcctgtatggcatccatctccctttctggaccctggagaaagaaagaaaaaacataagccccaccgggtgcgatggctcgtgcctgtaatcccagcactttgggaggccgaggcagatggatcacgaagtcaggagatcgagaccatcccggctaacacggtgaaacacagtctctaccaaaaatacaaaaaaaaaaaagccaggcgtggtggtgggcgcctgtagtcccagctactcgggaggctgaggcaggagaatggcctaaacctgggaggcagagcttgcagtgagctgagatcactctactgcactccatcctgggcgacagagcaagactctgtctcaaaaaaaaaaaaaaagcaaaaattagctgggcgtggtggtgtgtggctgtagtcccagctgctcgggaggctgaggtgagaggatcatttgaacctaggaggcggaggttgcagtgagtcgagatggcaccactgcactccagcctgggtgacagagcaaaacccgtctcaaaacaaaacaaaacaaaacaaaacaaaaaaagccccagaggccaggggttatgcttccatgtggccaaatgcatgtcagtactcaggcagaccctgccttctagaagcctcctcaccacctaggataggctgaataagaagaacctgtaaagattgcatgtcctggctgggcgcggtggctcacacctgtaatcccagcactttgggaggccgaggcaggcagatcatgaggtcaagagagcgagaccatcctggccaatatggtgaaaccccgtctctactaaaaatacaaaaattagttgggtgtggtggcaggtgcctgtagtcccagctactcgggaggctgaggcaggagaatcgcttgaaccgggaggtggaggttgcagtgcgccgagatcacgccactgtacttcagcctggcgacagagcgagactccgtctcaaaaaaaaaaaaaaaaaaaaaaaattcatgtcctaatccctggaacctgccaatattaaccttacatggggccaggcacagtggctcactcctgtaatcccagcactttgggaggccaaggcaggtggatcacctgaggtcaggacttcgagaccagcctgaacaatatggtgaaaccccctctctactaaaaatacacaaattagccggacgtggtggcatgcgcctgtagtcccagctacttgggagtctgaggcaggagaatcgcttgaacccgggaggtggaggttgcagtgagccgagactatgccactacattacagcctgggtgacagagctagactccatctaaaaaaaaaaaatttacacaaatgaaatagtgatgtaggaagagttaatcacgtgcttcataccttggtttcgccccaggtggccttgccaaaattatctgcgtactcttcatcatctgtgatcagaaagttatcaaaaatggttccagatctcacctgcagatgaaaataaggccttcattattatgcttttattctttattatttgtttatttttcatttcttttttcctttggaaatacatgaagctcaggtgacattttttattttttagagatggggtcttgctatgttgcctaggctggatttgaacttctgggcttggccaggcgtggtggttcacacctataatcccagcactttgggaggctggggcaggtgaatcacttgaggtcaggagttcaagactagcctggccaacacggtgaaccccatctctattaaaaatacaaaaattaccaggtgtggtcgtgcatgcctgtagtcccagctacttgggaggctgaggtgggaggatcgcttgaacccgggaagcagaagctgcagtgagttgagatcgtgccactgcactcccgcctgggtgacagagtgagactcagtctcaaagaaaaaaaaaaaagaactgggctcatgtgatggtcccacttcagcctccccagtagctgggactattacaggcgtgagccatactgtccctggctactaggccttcattattgatgtgacatatgtaacaacttttcaaaaagaaacagttgtattttgctcagtagtgtatactataacagcaattagaatagtaggtggtgcttaaacccatttctagaatatcctttccctctaaggcactggttccttaaacgtggctgcacatcgggatcaccaaaactttttttttttttgagacttagtctcgctctgttttttttttttttttttttgagatgaagtgaagtctcactctgttgcggaggctggagtgccgtggcgcgatcttggctcactgcaacctccacttcctgggttcaagtgattcctcccaggattaagttattctcatgcctcaccctcctgagtagctgggactacaagcacgcaccaccacacccagctaatttttgtatttttagtagagacgaagtttcactatgttgcccaggctgctctcaaacgcctgagctcaggcaatctgcccccctcagcctcccaaagtgctgggattacaggcatgagccactgagcccagctgggatcaccaaagcattaaaacaaaaaaacaaacaaaactctcagcactttggaaggctgaggtggaaggactgcttgagcctagaagttctgagactcccatctcttttttttttttttttttttgagacggagtcttgctctgtcacccagactggagtgcagtggcccgatctcagctcactgcaagctctgcctcccgggttcacgccattctcctgcctcagcgtcccgagtagctgggactacaggcgcccgccaccacgcccggctaattttttttgtatttttagtagagacggggtttcaccatgttagccaggatggtctcgatctcctgaccttgtgatccacccgcctcagcctcccaaagtgctgggattacaggagtgagccaccgcgcacagcctagactcccatttcttaaaaaaaaaaaatctggatgtggtggcttgtgcctgtagtcctagctacttgggaggctgaggtgggaggatcgcttgggcctagtttgaggctacagtgagctaggatggtgccactgcactccagcctaggtgacagaatgagaccctgtctcaacaaaacaaaacaaaacaaaacaaaacacacacacgcaaaaaatctaaagtaaagttaaaaccaaatgacctgccaaagctccaggccaatggcaccaatgttctcaaattctgagaggtcatactgcgtcaaatagtcggtattcttcatcttacggtggagccagacgtctttatgaataccttctggtttcaggccatcctgtatcaaaaaaaccatatggggtggtctcaatgacatgggcagcggaggggcagccctggggcatccctggcatcatacaaagaggccacacacctggtacgggggcttctggagcatcggcgctggccagtccccatccaggtcaccgttccagtcgctctgcttgctggtgctggcgtccagaaaatgcttctcccagtccttcaaagacatgtaaggaaaaagtaaaatcagtcagatgctcatatatttgttgttgttgcttctgtttttgtttcttgagactaggttttgctctcacccaggctggagtgcggttgtgcaatcatggctcactgcagcctcaacctcttgggctccagtgatcctcctgcctcagcctcccaagtagctcggactacaggcgcccgccatcatacctggctactatttttatgttttgtacagtcagggtctccctctgttgcccaggctggtctcgaactcctgggttcaagcgatcctcctgccttgacctctggaagtgctggtattacaggcattagccaccacacccagccagatgctcagatttgagaaaggaaattattagatgccaagtggcaggcacaggctggtgacccctgtcccagtgtccctctcccttcttcagtttggtggtcaggaggccaagtgcttggtgcttccaatcccactgaggacttcagggcaacaccacactgcctagatttttctccctaacctgccatatgactttagccctttcctgcatgctatggagaggagcagcggtgtggaaacctcaagtagtggctagagtgaaaaatgatggtgcaaaaagtgatggtgatggccagatgtggtggctcacacctgtaatcccagcactttgggaggccaaggcaggcaaatcacttgaggtcgggagttcgagactagcctggccaacatggtgaaaccccatctctactaaaaatacaaaaattagccagggatggtggcgggtgcctgtaatcccaggtattcgggaggctgaggcaggagaatcacttgaacctgggaggcggaggttgccgtgagctgagatcacgccactgcactccagcctgggcaagaagaacgaaactctgtctcaaaaaataaataaataagtaaataaataaatgttttacgataccttcagatgtgtagagatgtggctggtctgcagtgtgtgctctggggagggcatttggttctataatattgccatcgtggctaccagccatgcagcaattgtccagtaactgggtacttacaaactacatttgtgcactttttagagttgcccaggaaaaattcacacctgggctttgttgtctttagtctgttcccaatccttcgattctgccggggacgtttccttcttgagtgatgttaagttccagtcgtactctatgctgccggattcaattgactgaccatcaattttcacatcataagaaagatctggtcttaaaattagagtgtacaggtgtgtgaagccatcaacctgcatattttagggggaaaagcgtaacaattaaatcctcaatttcttttttcttttcttttctttttttttttttttttgagatggagtctcactctgtcgcccaggttggagcgctgtggcacaatctcggctcactacaacctccacctcctgagttcaagcgattctactgcctcagcctcctgagaagctgggattacaggcacctgccaccatgcctgggtaattttttgtgtctagtagagacagagtttcaccatgttgaccaggctggtctcgaactcctgacctcaggtgatccacctgcctcagcctcccaaagtgctgggattacaggcatgagccaccacgcccggccaactctcgatgttttaatgcaagtctaaatatgcagtttatttttatttttatttttttgagacagggtcttgctctgtcacccaggctggagtgcagtggtgcaatcagagctcactacaaccttgacctcccaggctcaagtgaccctcccacctcagcctccccagtagctgggaccacaggttcctggcactacacctggctaatttttgtattttttgtcatgacaagatttcgccatgttgcccaggctggtcttgaactccttggctcaagcagtcctcctgcctcagcttcccaaactgctgggattacaggtgtgagccactgcacccagacatttctccagaatgtttttttcatcctgaatatttcattcattaatgaggatggatgtggctgaaatgtgactgtactattgtaaccctcatagggcaaatgatgacatgtcatagctcacagtaaaaaatgagagtgccctcctgatggggtaaaaacttcaggaaaccagttaaaggagagaagtatctccaatgggccccctaaactggaaactggaaacaggaggtatgtctacaaagacccatccctggctcagttaagtattttattatcaaaactattttttctaaacttagtctggcaggagttaacactcatttatttgaatacaagagcagttaccttacacctgatcagtttcttgttttcgtgatacttattcttgaaatgtaaaataacatgaactttcttgatatcaaatccacaaatatcgggtcctacaaaaaagattagctgctctcaatttctttccataatgcatcaccgtagaataaccaacccacaaccattctttttttttttttgagacggagtcttgctgtcacccaggctggagtgcagtgatcttggctcacggaaacttctgcctcttgggttcaagcaattctcctgcctcagcctcctgagtagctgggactacaggcgcatgccacgatgcccagctaatttttgtatttttagtagagatggggtttcaccatgctggccaggctggtctcaaactcctgaccttgtgatccacctgcctcggcctcccaaagtcctaggattacaggcttgaaacaccacgtgcagtccattcttcttacatataatcagatattcacactaagatatttatttatttatttgagacagagtctcactctgtcgcccaggctggagtgcagtggtgggatcttggctcactgcagtctccgcctcccgggtttaagtgattctcctgcatcaacctcccgagtagaatagctgtgattacaggcatgtaccaccaggcccagctaatttttgtgtttttagtagagacaggttttgccatgttggctaggctggtctcaaactcctgacctcaagtgatttgcctgccttggcctcccaaagtgctgagattataggtgtgagccactgcatctggtcacatgtgtgaatatcttattattgttgttaaaggacaatgtcctggctttccactcacttttgagtgtgttctgaagcttatttaaatattcaaagtggcctgctaatcccagcactttaggaggccaaggtggggagatgacttgaggccagtttgagaccagcctggccaacatggtaaaaccccgtgtgtactaaaaatacaaaaattagctgggagtggtggcgtgtccctgtagtcccagggacctgtgaggctgaggtgaggggatcacttgaacccaggaagtggaggttgcagtgagctgagatcgggccactgtactccagcctgggtgaccaagcgagactccgtctcaattaaaaaaaaaaaaaaagtgtgggctgggcatggtggctcacggctgtaatcccagaactttggggggctgaggcgggtgaatcacgaggtcaggagttcgagaccagcctgactaacatggtgaaaccccacctctactaaaaatacaaaaattagccagccatggtggcacacgcctgtaatcccagctattggggaggctgaggcaggagaatggcttgaacctgggaggcggaggttgcaatgagccgagattgcaccattgcactccagcctgggtgacagagcaagattctatctcaaaaaaaaaaaaaaaaaaaggtatttacacatgtaatggatgttcatgaggaaatgtagacagatgggctctgtgttgcctgtctgaggttttatgcataacttatgcataggaattcatgcaaatgtcaagactgacaataactgtgcttcccttgtcctcctccttaacccctcaccctcagcaagctcccctcacactaatggctggcgctgactcattgcaacaaagtgtcccaatagtaacagagtgggtttgagtaaaatggaactgttgaattaaaaactgaaatactaagaaaaatttattttaatctttttttgaccccaaattatgctgcttggcaattcagatgtagtagacacatgctatataggggtctttatttatttatttatttatttcggacagggtcttattctgtcatccaggctggagtgcagttgtgtgatcatagcttactgcatcctcaaactcctcggctcgggggattcccctgcttcagcctcctgagtagctagaaccacaggggtgcgccacctcactgggttaatttttaaaattgttgtagagatggggccaggcgtggtggctcacgcctgtaattccagcactttgggaggccaaagtgggtggatcacctgaggtcagtaggtcgagaccagcctgtccaacatggtgaaaccccgtctctacaaaaatacaaaaaaattagctgggcatggtggtgggcacctgtaaccccagctacttgggaggctgaggtaggagaatcgcttgaacctgggaggcagaggttgcagtgagccgggatcgtgccgttgcactccagcctgggcgacgagcgaagctgtgtctccacaaaaaaaaaaaaaaaaacattttgtagagatggggtcttgctatattgcccaagctggtctcaaactccggggctcaagtgatcctcccttgatgtttcagatatctgggtgttttttagttctatttttatttttattttgtattttgtatcatttatttatttatttatttgagacggatttttgctctcattgcccaggctggagtgcaatggtgcaatctcggctaaccataacctctgcctcccaggttcaggtgattctcctgcctcagcctcctgagtagctgggattattacaggcatgcgccaccacgcccagctaattttcaatttttttttttttttttgagacggagtctcactctgttgcccaggctggagtgcagtggcgtgatctcagctcactgcaagctccgcctcccaggttcaggccattctcctgcctcagcctcccgagtagatgggactacaggtgcccaccaccacacctggctaattttttgtatttttagtagagacggggtttcactgtgttagccaagatggtctcaatctcctgacctcgtgatctgcccacctcggcctcccaaagtgctgggattacaggtgtgagccaccgcgcccggctctaattttgtatttttaatagaaacggggtttctccatgttggtcaagctggtctcgaactcccgacctaaggtgatgcgcccgcctctggctcccagagtgctgggataacaggcgtgagccaccgcacagagccctaatttttattttttgtagtgacagggtctcactatgttggccaagctggtctcgaactcctggactcaagtaatcctcctgcctggcctcccaaaagtgctgggattacaggcataagccactgtgcccagctgaggatgaatattttggaagtacattcattctttttttggagatggagtctcgttctgttacccaggctggagtgcagtggtgagatctcggctcactgcaacctccacctcccaggttcaagcaattctcctgcctcagcctcctgagtacctgggactacaggcatgtgccactatgcccggctaattttttttgtatttttagtagagatagggttttaccatgttagccaggctggtcttgaactcctgaactccagtgatctgcccaccttggcctcccaaaatgctgagattacaggtgtgagccgcgacacccggcctgaggtacatttattattaaagttttaagttacactatacttaggtctatttcctgtggcccagtgtggtcccttcccagttctagcacaaattttaatcaagtacccctgttgtcaggagacatttaatattttctagaggtttgcaggctttttctataaaggccagatggtaaaatatttttggctttgtaagcctaatgatctctgtcatgacaacttaactctgccactggtactggcgagcagccacagacaacatataaatgaacagagtgaggctgcattccagtaagacttcatttatgcacactgaaatctaaatttcatataattttcatgtatcacaaaatatcatcttgtattgattttttccaaccagttaaaaacgtaaaaaacatttttagttcacaggttatataaacacaggcagtgggccaatttggcccacggccaaggtttactgagtactgaaggattcaaaacacaggttgaggccaggcgtggtggctcacgcctgtaatcccagcactttggaaggccaaggtgggtggatcacctgaggtcaggagttcgatacctgccaggagttcgagaccagcctgaccaccatggtgaaaccccatcttggccgggtgcagtggctcacgcctgtaatcccagcactttgggaggctgaggtgggcggatcacctgagatcgggagttcaagaccagcctgaccaacatggagaaaccccgtctctactaaaaatacaaaaattagctgggcatggtggtgcatgccggtaatcccagctacttgggaggctgaagcaggtgaatcccttgaacctgggaggaggaggttgcagtgagccgagatcatgccattccactccagcctgggcaacaagagcgaaactctgtctcaaaaaaaaaaaaaacccatctctactaaaatacaaaaaaattagccaggtatggtggcacatgcctgtaatcccagctactcaagaggctgagataggagaatcacttgaacccaggaggcggagattgcagtgaggcgagatcaagccattgccattgcactccagcctggttcacaagagtgaaaactcgggctcgaaacaaaaacaaaaacaaaaacaaaaacaaaaacaaaaacaaacaaacaaaaaaactacacaggttgagcatcccaaatcaaaaaatcgcaaatctgaagtgttccaaaacccaaaacttttagaatcaacatgatgctcaaaggaaatgctcatcagagcattgtggatttcagatttttcagattagcgttgttcaaccagtaaggataatgcaaataatccaaaatccaaaaaaaatttccaaaatccaaaacactctggtcccaaacatttcagataaggtatccttaccctgcatgagggcaacattaatggtgaataaataacttcttcaggaacacaacagactggtacagttgcctttttatattaattaggcttaatagtgcttggatccgatacactcaatactactacaaaccttggatccgatatactcaatactactaccttcactacattagcaaagtcttagtctaaagatcctgtgaagtgggagggttttcaaagtcactagaagtggttgtgttgcaccacgtaaactcaccaaacataatatagtactgcgattttccattcaggttcttctggtcaatgtctgcaggaaagaccttaatgtagccccctccacagtccatcttctgctcatgttttactgtgtactgaataaccagagttttccctttattgctgaacggtttgaagcgtgcagagatggcatagaatcggccattctgagtggtttgcagacctttgaacaaaatatactcatgaaggatcaggaatgacgctgcgctaagtaacgcaggaagttaaatcgatgtccttcccttactcccaaacataaatgtcctaaccatttacagtgatctacagtgccaacagagcattatacaataatgcataatgggtagaccactagcaggcactctgcttctatataattttttttttttgacatggagtctcactctgtcgcccaggctggagtgcaatggcgtgatctcggctcactgcaacctccacctcccgggttcaagtgattctcctgcctcagcctcctgagtagttgggattacaactacaattagccaccacgccaggctaatttttgtatttctagtagagatagggtttctccatgttggtcaggctggtcttgaactcctgacctcaggtgactgcccgtctcagcctcccaaagtgctggaattacaggtgtgagccagcgtgcctggcccatacaacttttatttcacacacctggaagtttttgttcttaatataccactgttcttaattagttaattaattattttttgagatggagtctcgctctgtcgcccaggctggagtgcagtggcacgatctctgcccactgcaagctccacctcctgggttcacgccattctcctgcctcagcctcccgagtagctgggactacaggcgctggccacaacacccagctaattttttgtatttttagtagagacagggtttcaccatgttagccaggatgttctcgatcccctgacctcatgatccgcctgcctcggcctcccaaagtgctgggattacaggcgtgagccaccgtgcccgactggtccctttcctaaacattctactctgccttttcagcataaaaggcagccatagacaatatataaatgaatggactgccaggcatgctggctcacgcctgtaatcccagcactttgggaggctgaggcaggcggatcacggggtcaggagtttgagaccagcctggccaacatggtgaaaccctatctctactaaaaatacaaaaattagcggggtgtggtggcatgtgcctgtagtcccagctactcaggagagtgaggcagaagaatcgcttaaacccaggaggcggaggttgcagtgagccgagattgcaccgctgcactccagcctgggtgacagagtgagactccgtctccaaaaaaaaaagaatggatgtggctgtgttccagtgaaacttaatggacactaaactttctttctttcttttcttttttcttttgagacagaggctcgctctattgcccagactgaatctctgctcactgcaacctccgcctcccaggttcaagcgattctcctgcctcagcctcctgagtagctgcgactacaggcgtgcgacaccatgcctggctaattttcatatttttagtagagatggggtttcaccacgttgcccaggctggtcttgaactcctggcctcaagtgatccactcaccttggcctcccagagtgctaagattacaggtgtgaaccactgtgcctggcctaaactttcacatatgtgaaagcaaatacaatttaaagccttgagaggccaggcatggtggctcacatctgtaatctcaacactttgggaggctgagccgggtggatcacttgaagtcagaagttcgagaccagcctggccaacgtggggaaactccatttctactaaaaatacaaaattagccgagcgtagtggcgcgtgcctgtggtcccagctactcgggaagctcaggcagctgaactgtttgaacctgggagatggaggagccattgcaccccagcctgggtggcagggcgaaactccgtttaaaaaaataaataagccagacgcagtggctcacgcctgtaattccaacactttgggaggccgaggcgggcggatcacctgaggttgggagttggagaccagcctgaccaacatggagaaaccctgtctctactaaaaatacaaaattaggccgggcgcggtggctcatgcctgtaatcccagcactttgggaggccgaggcgggaggatcacgaggtcaggagatcgagatcatcctggctaacacgtgaaaccctgtctctactaaaaaaaaaaaaatacaaaaaattagccgggcgtggtggcaggcgcctgtagttccggctactcggcagaagaatggcgtgaacccaggaggcagagcttgcagtgagccgagatcgcgccactgcactccatcctgggctacagagcgagactccgtctcaaaaaaaaaaaaaaaaaaattagccaggtgtggtggcacatgcctgtaatcttagctacttgggaggctggaagcaggagaatcatttgaacctgggaggcggaggttgtggtgagcagagatcacgccattgcactccagcctgggtaacaagggtgaaactctctctcaaataaatacataaaataaataaaaaccttgagcaagttgtgtgatctgagtcatgcagcatgcaggtgtaacctctgcttcttaaatcatagataaaccttcttcctcattgttcttgtttggcaaatgactaggacaaaccagagaccaggcctcctctatttgtgaccactgaccttagttacagattaactgcctccaggactgacctgtacctaactcagaccagatggcacaaaagatgccgtgactgttacatcttcagggtgaaatgttaaatataccttctcaaaagaaaaagaccaccttgactaatgggatcatggtcattatctatcaagccttgcctagaaagatgctgaaattctgttaagcttctctaaactttgtctatacaaatgatcccaaacttctacacttcagaacactgacttctattctttgggatctgtgttttccacacagttgtccttaaactttgagcttgaattagctctcttgaagctagaatttttttttttttttttttttttttgagacagagtcttgctctgttgcccaggctggagtgtagtggcacgatctcgactcactgcaacctccgcctctcgggttcatgtgattctcctgcctcaatctctcaagtagctgggactacaggcctatgccaccatgctcggctaatatttgtatatatatatattttttttcttgagacagagtcttgctcggttatccaggctggagtgcagtggcatgatcttggctccctgcaacctccgcctcctgggttcaagtgattctcctgcctcagcctctgaagtaggtgagattatagatgtgtgccaccatgcccagctaatttttgtatttttaatagagacggagtttcgccatgttggccgggctggtctcaacctcaagtgattcgcttgccttatcttgacctgcctgtacaaaagtaaaagctcattgtgttgtaccctgaagaatgtgcaggcgacaagatgtaatgtttatctctgtatttttttcttttattttttgaaatggagtctcattctgtcacccaggctggagtgcagtggtacaatctcagttcactgcaacctctgcctcctgggtacaaacgattcttctgcctcagcctcccaattagctgggattatagttgtgcgccaccacacttggctaacttttttgtatttttgtggagacagggtttcaccatggtgaccaggctggtctcaaactcctgacttcaagtaatccgcctgccttggcctcccaacatgctgggattacaggcgtgagccaccgtgcctgaccatatttttctttttttttgagatggagtctcactctgtcactgaggctggagtgcaggggcatgatctctgctcactgcaacctctgcctcccgggttcaagtgattcttctgcctcagcctcccgagtagctgggactacaggcatgagccaccacacccagctaatttttgtatttttagtagagacagggtgtcaccgtattggccagactggttttgaactcctgacctcatgatccgctcgcctaaggcctcccaaagtgctgggattacaggcatgagccaccgcgcctggcctatttttctttttaatacgaaaattaaaatgagaaaaagtacccactaaccttttccttctgaggggcatggcccttgatcctcaaatgcacttgactagtgtctattaagaggggcaattttggtaatgcctactaataacacattcatataaatataatccaaagaaggttaaataccattgcatatttgacagtgcttcaagtatgattttattataccaaataagctgaatatgtctccttggacttcaggggacctaataccaataaaagtaataataatgataataggccaagcaccatggctcacgcctataatcccagcactttaggaggccgaggcaggtggattacttaaggccaggagtttgagtccagcctgggcaatgtggtgaaactctgtctctaaaaaaattagcagggcatggtggcgcacgcttgtaatcgcagctcctcagaagcctgaagcaagagaatcacttgaacccgggagacggaggtttgagtgagccaagatcgtgccactgcactctagcctaggcgacagagcgagactcctactaccaaaaaaaaaaaaaaaaaaaaaaaggaatctttggcaataaagaaaggagagaggaggctggatgttgtggctcatgcctgtaatcccagcactttgggaggccaaggtgggtggatcatgaggtcaggagttcgagaccagcctggccaacgtggaccctgtctctactaaaagtacaaaaattagccggtcatggtggcgcgcgcctgtagtctcagctactcgggaggctgaggcaggagaattgcttgaacccgggaggtggaagttgcagtgagccgaaatcgcgccactgcactccagcctgggcaacagagcaaggctccgtctcaaaaaaaaaaaaaaaaaaaaaggagagaagaaacaaaaaaacaaggaaaggagccccttaagttctacctttgccttaatgtcttcatctgtaaaacgggaataaaagcgttttggctgtgccacaactacctagagaggttgctatggaaatgtaacattaggctcaatttggtcctgattctacactaacctttatctttctctttatgaccataaaacttgcccgacgaaagtctaaaatgcccaaatcgggagtcattggtggactgcaaccatcggtttctccaatgctctgtggggaaggggaaataacaccggttagaggtgataatggttaatttgggctaagggaagggtgaaggggaccctcgaggattcgagggttcgctgccgtggaccccgtggcgactctggccagccttagggggcggagatgggggagcttacacctccgccaccacgggcgtggccccttcacctccgtctagaaattcctcttggaaatagacggtagccagcgccactcgcagcatgcatatggcccagagctggaccaaagcccgggccatgggggtgtgcactgcgcttccggtcgccgccaccccttagctcccagctctctctgcggctcttcaggcgcgtcccgaaactacaactcccgtcacaactcgcgattatgacctgagggtcccattggtcgctgcggcgcggggcacgttgggcccgccccggaactaccgctcccatgacaccccgcgattgtgattcggggcgccattggtctgcggggcgcggtgcttcccgggagatgtagtctcttctgctctggctctgttgcccagggcaaccgctccttcaggcgtgaatgtggcggctgcctctgcgaatggacggcgtgggaagaggtcggcagggctggtggggaggtgacctagctgggcgtccgggctcgcgagggggatacggggaaatggggccttctccggggctgagctggttgggccgctgcaggatggtcccgcgcctcagtttccctgtctggggtctattggagcatggtcctgcgcgggtcgcttcatagctggggagaagagcaggatggtctcaggggcgccagggttttcaagttttggtttgttgatttgtaacaactttattgagccttcatttacataccatagtgttcgccacttttaagctgacgactccgttatttttagtaaatctacaaagttgtgaagccgtcgccaccatccagctcatccagctttagaactttgcgtcaggccgggcgcggtgattcacgcctggaatcccagcactttgggaggcagaggcgggaggatcacttgaggccaggagatccagaccagcctgggcaacctggcgagaccccatctctaaaaaagataaaaataaaaaattagccaggtgtagtggcacgcgcctgtagtcccagctactcaggatgttgaggcaggagggaggattgcttgtgtccaggaggtcaagggctgctgtgagctgtgatcatgccactgcactccggctaattttttgtatttttagtagagatggggtttcaccatgtttgccacgctggtctcgaactcctgacctcacgtaatctgccagccttggcctcccaaagtgctgggattataggcgtgagtcacagcaccggcccgatctgctttctgagtttattggtttgccttttcttgacagttcttacaaatgaaatgatagggtgtgtggagtttagtgtctggctactttcttttttctttccttttttttttttttttgagacagattctcgctctgttacttaggctgaagtgcaatggtgcgatctcggctcactgcgaactccgcctcccaggttcaagcaattctcctgtctcagcgtcctgagtatttgggattacaggcgcatgacaccacgccccgctaatttttgtattgttagtagagacggggttttaccatgtgtgtcaggctggtctcgatctcctgacctcgtgatccgcccgccttagcctcccaaagtgctgggattacaggcgtgagccactgcgcccggcttggctactttcccttagcgtgatgtatttgagattcctgcgtgctgttatattagtatttgttttttaaattgctgaactgtattacactgtatggatggaccatagtttgtaatccattcactaattaatggatagttacattgttttccgttttagtctactaggagtaataaatattatggggccaggtatgatgatgtgggattgtaatctcagcattttgggaggctgaggctgcggatctctagaaccccaggaatctgagaacagcctgggcaacacagtgagaccttgtttctacaaaaagttagctaggcatggcaatgtgtgtctgtagtcccagctacccaggaagctgaggtgggaggatcgcgtgaccccgggaggtcgaggctgtagtgagccatgataacaccactgcactcagcctgggcaacagagtgagagcctgtctcaaaacaaaacaaaactattacgaacatttgcatacatttgcatttctcttgggccacatgggagtggaatccctggatcacatggtaactctatgtctaaccttttgaggaaccaactgttttccacattgaggactacataattttacaattcccccaacaacatatgagggttccaatttctttattttttttagagatagggtcttgccctatcatccgggctggagtccagtggcacgatcatagctcactgcagcctcaaactcctgggctcaagcaatcctcccacctcagcctcccgagtaactgggactacaggtgtgtgccatcagacccagctaattttttcattttttgtagagatggagtctccctatgttgcccaggctggtctcgaactcatgggttcaaacagtcctcccatcctggcctcccacagtgctgggattacaggtgtgagccactgtgggcttcaatctgttcacttcctcactgacacttgttacgtgtatttttgattatagccatgctaggggatgtgaagtagtagctcctcatggtttttttcttttttttttttgagacggagtctctctcttttgcccaggctggagtgcaatggcgcgatctcggttcactgcaagctctgcctcctgggttcatgccattctcctgcctcggcctcctgagtagctgggactacaggcgcccaccaccgcgcccggctaattttttgtgtttttagtagagacggggtttcactgtgttagccaggatggtctctatctcctgacctcatgatccgcccacctcggcctcccaaagtgctgggattacaggcgtgagccaccacgcctagtctgttactggcatttaaatgttactgagcactttttcatgtcccacacagaatatataggaatcctatgagggtagtaattgttatttttacagatgagcaggctgacacagagcgattaagtaacttgcccggggtcacacagaccaggaagtctgcattatttctgccaggcatatttttctgttctctgacccctgtggtcagtcctgtgctgggcactcctagtacagggtagttaagataggaacaagcaaacaagtttattcgggaaacagattgttaataggaatcataattcattcttgtatagaatcttttttttttctttttttttgagacggagttttactctgtcacccaggctggagtgcagtggcgcagtctcggctcactgcaagctccgcctcccgggttcatgccattctcctgcctcagcctccggagtagctgggactacaggcgcccgccaccacgcccggctaatttttttgtatttttagtagagacggggtttcaccgtggtctcgatctcctgacctcgtgatccacccgccttggcctcccaaagtgctgggattacgggcatgagccaccgcacccggcctgtagtttttcatcttttaaagtctttgtaatcttcggaagcctttgtaagtcttgcagtgggttgttcatactctttcaggggtatatgggaactctgagaatatgatgaaagctctgatatttctacctagaaaaatatacacatacggtaaagatttgctggcctgctggggagctgtgcctgtccatagcccccctctttcccagggtagcggttcttcttttttttttgagacagagtctcgctctgtcgtccaggctggagtgcagtggtgtgatctcggctcactgcaacctccacctcccgggttcaagcgattctcctgcctcagcttcctaagtagctgggactacaggtggtgccaccaggcccggctaatttttgtatttttagtagagacggggtttcaccatgttgatcagactggtcttgaacttatgacctcgtgatccacccaccacggcctaccaaagtgctgggattataggcatgagccaccacgcctggcgcttgactaatttttgtatttttagtagagatggggctttgccatgttggccaggctggtctcgaacccctgggctcaggtgatctgcttgccttggcctcctaaactgctggcattataggtgtgagccactgagcccagccattggtaatggttcttacactaagtgaaatctgattttctgggggcttgttaaatacagggatacctcgattttcacacgtcaccttattgctctttcaggtaatttgtcttttcttttttctttttctttttttttttttttagacagggtttcactctgtagcccaggctagagtgcagtggcaggcatggtggtgtgcacctgtagtcccagctacacaggaggctgaggcaggaggatcacttgagcctgagaggttgtgcaccaccacgtccagctaatttttgtatttttagtagagacggggtttcaccatgtttgccaggatggtctcaatctcttgacatcgtgatccacctgcctcggcctcccaaagtgctgggattacaggtgtgagccactgcacccagcctggtcattttcattgtcatccttgggcttgaagggaagactgtggctgggttgcaaaagacagtgtgagcttttgccaagtaggagccattgaatgctcaatacaaacagcaggtactcttatgcaaaattgctcctcttcctccacagaatggcttctgcaaggaaagccagccgtcccatgcgtgatgtttttggtgacttcagtgatgtttccttggaagattcaacaatggaagaaatcagaaacttccagatcagtagaaatcttaccaaaatagcacctggtcatagcagatttctaaaaagaaaccaaactctagatgagaaacacttactcctgaaagagaaccctgtgctcgggagtggacccaggcttgcctcatgtagaccgcccaccactgcctccaggatccgagccaatgccgcactcatgaagctggcccagctggaaacccggatcatgaatcggaagctgcagaggaatttgtctgacacggaatctgactcaatgaccgccgatgctggtcttccaaagagagctgacagaatcctctctgggggtgcactcgaactcgcgtcccagaacacagacaaaacttcccagaatcaagcccgtgaacttcctgtcaccgaaaataatgcacagaacgcgaaggtcagtaggtttctaaagaagaaacaagcacctgttgaaaacatatcccctgaagcacctgctgggaaagagaggactttgcaaacccccaaacagaaagaacctgctagaacatttgattctccagacagtgacgaagaagaaatgaaagtattgctaggaagcttgatggactcttctagagaaaaaaacacgaatcaaggcttcagcagcgctaacgtcagcgaggaagaagaaagaaaactattttcggtgagattttttttttttggtaaatttattttaatttatttaatttaattttttttttgagatggagttttgctcttgttgcccaggctggagtgcaatggcacgatctctgctcaccgcaacctccactcctagattcaagtgattctcctgcctcagcctcccgagtagctggaattacaggcatgcaccaccacgcccagctaattttatgtgtttagtagagatggggtttctccatgttggtcaggctggtgttgaacttccgatctcaggtgatctgcccgcctcagcctcccaaagtgctgggattacaggcatgagccaccatgcccggccggtgactggctacttttttgtattttttttttttttgagaccaagtttcgttcttgttgcccaggctagagtgcagtggcgtgatctcagctcaccgcaacctccacctcccaggttcaagtgattctcctgcctcagccttcctgagtatctgggattacaagcatgcaccaccatgcccggctgattttgtatttttagtagagacagggtttctccatgttgatcaggctggtctccaactcctgacctcaggtgatttgcctacctcagcctcccaaagtgctgggattacaggtgtgagccagtgtgcgtggcctatttgtggaatattttctttctttccttttttttttttttttttttgagatggagtctcattctgtcaccaggctggagtgcagtggcctgatctcggctcactgcaacttctgcctcctgggttcaagcaattcttttgcctcagcctcccgagtagctgggattacaggagcataccaccacgcccagctaatttttgtatttttagtagagatggggtttcatcctgttggccgtgatggtctcgatcgcttgacctcatgatctgcccgcctcggcctcccaaagtgccgggatttacaggcgtgagccaccacgcccagccttgtggaattattttctactcccaacattatcttacctaaatattgtactgtgactttcagaaatgaagagagaaaggggatgcagtaagagaaaaatgtgatacctgtggtcttggtctcatgctccccgctaattgcactgtctgtttaaccataagaacttttaggtatcagccaggtatggtggctcacacctgtaatcccagggttttggaaagcttaggtgggtagattgcttcagctgtggtcaaggccagtctgggcaacatggcaaaacccattcctacaaaaaaaaaaaaaaaattagccaggtgtggtggcacatacttgtagtcctagctgcttgggaggctgaggtgagaggattgcttgagcccaggatgtcgaggctacagtgagctattgagccactgccctccagcctaggcaacagagtgagaccctttctcaaaaaaaaaaaacaaaaaacaaaaaaacaaaaaaccttagttgtcataagtttgttaatttcaagtgttttatatcaggtcccatctcaactgagagcatttactgtacccagcgtggaactctccagcgcaaagccttctcagacatcacacctgccaacctccctggcagcagacagaacccttcacagcactcgctcaagagcagactacccacagagtcacgtttccagtgacaccgcctcccacacgccgtcagtttccatcacaggcgccttttcaaactcagtgtctttaaagatggggcatgtcaagcttgtgtcctccccgggaaggagtgaggctgagactgtggacgagccagtctcagaaggtgctgatgacagcctcgacggtaatcccagtcccggtgcaaagccagtaccttgggcaggaagggtggggccacctttagagtccctgacgcagtggtcatggggcattgccacaggcagggagttttgagtcgcatctcacactcagctttctaactttcttgtctggttgaggggccaagtccgatttttgtgctatctttatttatttatttaattctgagacagggtcttgctctgtcgctcaggctggagtgtagtgggcatgatcagggttcactacagcctcaacctcccaggctcaagcaatccgcctgcctcagcctcctgaccagctgggaccacaagcgtgtgccaccacaccgggctaatttttgtactctttgtggagaccaggtttcaccatgttgtccaggctgatcttgagttcctggccttaggtgatctgcctgccttggcctcccaaagtgctgggattacaagtgtgagccactacacctggcttaccaactcatctcttgagtcaatttaaacctgttggaagctgttggaggctaggcctggtggctcacgcctgcaatcccagtgctttggaaagcctaggcaggaggagtttgagaccagcctggcaacatggtgaaaccctgtttttacaaaaaatacaaaaattaactgggtgtggttgtgcgcacctgtagtcccagctgctggggaggctgaggcaggaggatcgtttgagcctgagaattggagcctgcctgggaattggaggctgcggtgagctatgaacacaccactgcactccagcctgggtgacagagcaagactccatctctaaaaaaaaatttttttaaacccaaaaacctgttggggcaccagaatctccacagagaaccccacactcctgggtcccggcacacacttggttcaggcactggcctccaccctaaggttctgtggtgcctttgacttgctgtactatttttttgttttttagaactctttttttcagaactcacagtctattaacttgctgtaaatgacaacataggatgctttggggccatgtctcaggtctgcccctgctccacagtcttcccactctttccccccagctggctggctgccctgccacctcccaccccttacaccacacacgtacttctcagcaacttccaacagtacactctgatcagctgctaatctgtctagaccaggggctagcaggcctgtcttctgtctgtttttttttttgtttgtttgtttttttgagatgttgcccaggctggggtgcagtggcgtgatctcagctcactgtaatctctgcctcccaggttcaagtgatgctcctgtctcagcttcccaagtagctgggactataggcgcacgccaccatgcctggctaattttttgtatttttagtggagacgggacggggtttcaccatgttggtgaggctggtctttttttttttttgagatgacatctcgctctgtcacccaggctggagtgcaatggcgtgatctcggctcactgtaacctccgcctcctgggttcaagcgattctcctgcctcagcctcccaagtagctgggactacaggtgcccaccaccacgcccagctaatttttatacttttaatagagacagggtttcaccatgttggccaggatggtctcgatctcttgaccttgtgatccgcctgcctccgcctcccaaagtgctaggattacaggcgtgagccaccgtacctggtggtcaggctggtcttgaactcctgaccttgtgatctgttctcctcagcctcccaaagtgctgggattacaggcatgagccactgtgcccggccctgtcttctgtctgttttttttttgacagagttttgcccttgttgcccaggctggagtgcaatggcgtgatcttggctcactgcaacttccgcctccgagattcaagcaattcttctgcctcagcctctcgagtagctgggattacaggctcttgccaccacgcccagctaatttttctatttttagtagagacgggatttcaacatgttggccaggctggtcttcgactcctgacctgaggtgatccacctgcctcggcctcccaaagtgctgggattacaggcatgagccactgcaccaagcctgtcttctgtctttataaagctttctcagaaggcagccacgctccttcctttacacattgtctatggctgctttcacactatgacattggagctgagtcagtctgtccccaaaagctggaaatttcccagctagccttttattttttatcattattattatcattatttgttatgataattatttttgagacggagccttgctctgtcacccgggctggagtgcagtggcatgatcttggctcactgcaacctccaactccgggttcaagcgattttcctgcctcagcctcctgagtggctgggactacaggcacgtgccatcacacttggctaatttttgtatttttaatagagatcgggtttcaccatgttgaccaggctggtgttgaactcctggcctcagttgatctgcccatctcggcctcccaaagtgctgggattacaggcgtgagccaccatgcccgatgattattattattttttagagacagggtctctctatgctccaggctggagtgcagtggtgtgatcatagttcactgcagctttgaactggtctcaagagattctccggcctcagcctcctgagtagctgggactacaggcacccgccaccacgcctggctaattttttgtatttttagtagagacagggtttcattgtgttagccaggatggtctcgatctcctgaccttgtgatctgcccgcctcggcctcccaaagtgttgggattacaggcgtgagtcaccgcgcctggccatgtcttcatatctttctaaacatttgtgggagattaggctggctgcggtggctcacacctgtaaacccagcactttgggaggccgaggcaggtgaatcacttgaggccaggaattcaagaccagcctggccaaatggtgaaatcttgtctgtactaaaaatagaaaaattagccgggcgaggtgtcaggcacctgtaatcccagctactcaggaggctgaggtgagagaatcacttgaacttgggaggcagaagttgtggtgagccaagatcgtgccactgcactccagcctgggtgacagagtgagactctatctcaaaaaaaaaaagaaaagaaaagaaaaaagaaatttggaaggtttgtaaaaatttatggagtaaataagagagtaaatgtaaacgcttatactcattttttaattacagagtttagaataaatattttatcgcttgacggtctggctccagctgtcagtgagaactccgatttggaacaggaagtaagtacaacaaagtcatttttcatggtcgattgtttttggcttcaacatttttttttttaaatttttaaaaaatttaaaaattgaggcagggtctcactatgttgcccaggccgtcctcaaactgggctcaagcaatcctcccgattcagcctcccaaagtgctgggattacaggtgtgagcgaccatgcctggcccaatgtcgattcttatgtggaaaagcaagtaatgtttcatttaggcctatagttttcaaatctgccccccaggggacattggcaatgtctggtgacattttggctgtcatgactagggggtgggtgacagatgccactggcattgtgagtgggtggaggccaggaacactgctccatattgtgtaatgcaccgggtggcccccagctgccaagaatgttgtggcctctgatgtcaagagtgcagtaggtgagagaccctgatttaggtgctaacaggatgaagctaccttggttagctggtgattaaagcacatcccacgtaaagccgcccatgacaacatctgcacggaggcaacacttcaccagccgtatccagtcacactccctgttgtgatttttgtcctggtggccaccggcactgtcagatacacgtgttggttatacacagtgatgacattttatttttattttaaaatatttattgtttttattttattattattattattttttattttaaactttttttttttttttgagagaagtcttgttcttatcccccaggtttgagtgcaatggctcgatctcggctcactgcaacctccacctcccgggttcaaacgattctcctgcctctgcctcccaagtagctgggattaagtcccctgccaccatgcccagctaatttttgtatattttagtagagacggggtttcaccatgttggccaggctggtttcgaactcctgactgcaagtgatccacctgccttggccccccaaagtgctgggattacaggcatgagccactgcgcctggcctattattattattattattattattattttgagacagagtctcgctctgctgcccaggctggagtgcagtggtgtgatctcagctcactgcaagctccgcctcctgggttcacaccattctcctgcctcagcctcccgagcagctgggactataggcgcccaccaccaggcccggataattttttttgtatttttagtagagatggggtttcaccgtgttagccaggatagtctcgatctcctgacctcgtgatccgcccgcctcggcctcccagagtgctgggattacaggcgtgagccaccacgcccggccttaattattatttttttgagacacagtctcgctctgtcgcccaggctgggactacagtggcacaatctcagctcactgcaacctccacctcctggtttcaagcaattcttgtgcctcagcctcctgagtagctgggattacaggcacccgccaccctaccccactaatttttgtatttttagtagagatagtttcaccatgttggccaggctggtctccaactcctgacctcaggtgattcacccaccttggcctctcaaagtgctgggattacaggcatgcgccaccatgcctggcccaatttatttatttttgagacaggtctcactcaggctggaatgcagttgggggatcatggctcacttcatcctcgatgtcctaggctcaagcaatcctgcccagcctcctgagtagctgagactacaagcgtgcacccatgcctggctaattttttatttttttgtagagatatggaccggctgggttgtccaggctggtcttgaactcccagcttcaagcaatcctcctgcctcggcctttcaaagtgccgagattacaggtgtgagccattgcccccaggcatgatgaaacttaatttttaaaatattttttttcttacagaggtagggtcttgctatgtctcccaggcaggtcttgaactcctgagctcaaaggatcctgccgcctcagccacctaacatttcatcagtccatgatgaaatgttttttttttgagacagagttttgctcttgttgcccaggccggagtgcaatggtgtgatctcagctcaccataacctctgcctcctgggttcaagtgattctcctgccttagcctgctgagtagctgggattacagatacgtgccaccatgtctggctaattttgtatttttggtagagacggggtttctccatgttggtcaggctggtttcaaactcccaacctcaggtgatctgcccgccttggcctcccaaagtgctgggattataggcatgagccactgtgcccggctgaaaattttttaattttttttttcttatagaggtagggtcttgctgtgttgcccaggcaggtcttgaactcctgagctcaaaggatcctaccgcctcaaccacctaaagtccttaagtccatgatgaaatgttaaatgccatccacgtgccacctaagcatgcgtcacaccatcaggattcctgcagccccgtggacatgccgtactgaagacgccacagttctgtttagaatactccgtgcccacatctaatgaggacctggtgtgtccccttgtctgcgggagtgctgcaggtccccagctcctaggagtgcagtgttcctagcatgttgatatttccaaaacacttcccagccacctctgccattcttcattttaggaggaaagtgctcagagacaaaaaacagctggcaaaatcttcagagccgaggcgtccactgggcaggatgccccgaggcaggcccaggcgaggagctgggcatcacagggaaaggccgcctctgcagagggggatgagagcgaggtctcggagcatctcagtgccagctcggcttctgccatccagcaggacagcacttccagcatgcagccaccatctgaagcccccatggtgaacacagtcagctcagcttattcggaggattttgaaaactctccaagtctgacagcatctgagccaaccgcccattccaaggagtctcttgacagaacactggacgctttgtctgaatcctcttcaagtgtgaagacagaccttccacaaacagccgagtctaggaaaaagtcgggcaggcacgtgacaagagtgcttgtgaaggacacagctgtgcagacgccagatcctgccttcacctacgagtggaccaagggtaagccttggggcccgtgggggccggggcagccgggacaggagctcagcgtgtggtttacagcatcctgggagacacgtgggagagctcaggttcctgagatttgggctcttgttattaatcacctggaggggttggccaagcaaggtggctcacgcctgtaatcccagcactttgggaggccgaggcgggaggatcacttgaggtcaggagttcaagaccagtctggccaacacagggaaccctcatctctactaaaaatacaaaaattagctggctgtggtggtgtgttcctgtaatcccagctactcaggaagctgaggcttgagaagaacccgggaggtggaggttgcagtgagctgagatgatgcccctgcactccagcctgggtgacagaatgagactctgtctcaaaaaaaataaaagtcacctagggaccttggctcaccatttcctcttccatggacgagggacagccgccctcgtgtgtcccgatgtcttcctagccctgaagcattcagaaggatcagaaccaaggactagggtagcacctcccacaggatgattcacggggggactccagcaaggtctggagacattattagttgtcacaactcagggtggggaatgctatcggcatctgctgggtggaggccaggggtgctattccacaccccgcagtgcacaggatgcctttgtcctggagaatgaacaccctgggtgactttccagatatttctctctctctctctcactctgtttttagagatggggtcttgctatgttgcccaagctggagtacagtgacccaatcatagctcactgcagcctcaacctccctaggctcaggtgatcctcctacctcagcctcctgagtagtaggattacaagcatgcgcccccatgcctggctaatttttatattttttgtagagacagggtcttgccatattgcccagcctggtctcaaactcgtgggctcaagcaatctgtcagccttagcctcccaaagtgttgggattacaggcgtgagccactgcacccggccctgtatcttttttttttttgagatggagtctcactctcttgcccaggctggagtgtagtggtgcgatcttggcttactgcaacctccacctcctgggttcaagcgattctcctgcctcagcctcctgaatagctgggattacaggtatgtgccaccacgcccagataatttttgtatttttagtagagatggggtttcaccatgctggccaggctggtctcaaattcctgacctcgtgatctgcctgcctcggcctctcaaagtgctgggattataggtgtgagccaccgcacctggccccctgtataattttaaaatgttctttgtagagacagggtctccctatgttccccagcctggtcttgaactcctgggctcaagtgatccttccacctgctcatgttggccccccaaggtgctgggactacaggcatgagccaccatgcctggccttcgggcatttctctcattcccagcttcagtctcggctcttgctggtggaaaggccccattcttttaaacattcccatgttattattttattttatataattttattttatgagatggggtctcgctctgttgcccaggctggagtgcggtggcacaatctcggcccactgcctcctccacctcctgggtttcagcgattctcccacctcagcctccccaatagctgggactagaggcgcctggctaataaacattcccttttaatatctcttttctcatccatatggctcttgacaaggtagactggatgtgaaaaatgatgtagttcccagcctggccaatatggtgaaaccccgtctctactaaaaatacaaaaattagcctggtgtggtggcacgcatctgtagtcctagctactcgggaggccgaggcacaagaatcgcttgaaaccagaaggtggaggttgcagtgagctgagatcgtgccatagcaccccagcctgggcgacagagtgagactctgtctcaaaaaaaaaaaaaaaaaaaaaaaaaggcaatgtaattctcactggatctatttgttttgatttgggggcttaacctaacatcagcctgacgggccccccaggagagggtgagtggtgtctgtttctcaggagggaaagtcaatcacatggactgagtcaaatcaccttggaggtgttaaatggtattttcaacctgggatctgggctcagaattgtttgtgtctctctgcacttctgtccatatttttggcaatttagggatgctttcatgaaacactggcgaggctgttttcctagactaggactgacagggaaaggagaaagaaaaaacagcagccataaacacgctggcctcagagcccagagaacacgcaacatcctgaggtcaacagtgacccttagaagaagggctgggaaagcacatcctccactgctctcgactgcagccaccgtgagccggagccaccgctgcacccagctaggatacccgtgccttgagccaagaaaacctagcagaaaaatggaggcagccttgggaaatacttgaaaggggaagagggtaaaaaaaagtaaagaagggccgggtgcggtggcttacacctcagcactttcagaggctgaggcaggaggattgcttgagcctaggagttcaagaccagcctgggcaacatagggagaccctgtctctacaaaaaattttaaaaattagccaggcgtggtggcgcacctgtagtcccagctacttgggagacagatgggaggattacgtgagcccaggaggctgtagtgagctgtgatcatgccgtgcactccagactgggcaatagagcaagaccctgtctcaaaccaaaaaaaaaaaaaaaaaatgcaagagtggcgatcaccttcagaaagagggaagaacaaggtcacgtagtttattccagggtcgtatctgtggacccgaaagtcatttctctgcgtcctgcctgcttacccctctctttgtccccgagatagtggccagcatggcagccatggggcctgccctgggaggcgcctacgtggacccgacacccatcgccaatcatgttatcagtgcagatgcaatagaaggtaacagcccggctcgggggatccttcctgtcacattttacaggactcatttcacctgcagattcacacccactctggaggtgtggcaccccttgcatgctggcttccaggggtccattgggcagggattattgcagccacaggcacctgccatgaggagagaaaaggtgtggatgcccttgaaccttctgtctcttgcaaagagacaccaatgtcacacaaaacaagagggtgaagagtgatgcttctgtgccctgcaccccaacaaggccactttttttgtttgttcgttttgagacagtctcgctctgttgcccgggctggagtgcagtggcgcgatctccactcactgggacctctgcctcctgggttcaagcgattctcctgcctcagcctcccgagtagctgggattacaggcacctgccaccacgcccggctaatttttgtatttttagtacagacagggtttctccatgttggccaggctggtctcgaactcctgacctcaaatgatctgcccacctcggtctcccaaagttctgggatcacaggcctgagccgccctgcctggcacaagaccacttttgttttgtatgttccccttggtggcattacatcaataagccatagtttatttcccctgaagacatgtatttgactgatgctgagttgcacagcctgggtagacattcccttgcctcctgggctgagtctgtgtggccctcacaaaggctccagtccagcctgaggcatgagggaggggccccagcagccatcttagagagtttagtctttgtcgagtccagtggagccaataaaggcttgtgatacacgtaggggtccatctggtacctactatttttttcccttttcaattttttaattttttttttttgagacggagtcttgccctgtcacccaggctggagtgcagtggtgtgatcttggctcactgcaacatctgcctcccaggttcaagcgattctcctgcctcagcctcccaagtagctgggactacaggtgtctgccactacacctggctaatttttttttttgtttttttagtagagatggggtttcactatgttggccaggctggtctcaaactcctgatctcgaactcctgatcttgtgatccgcctgcctcagccttccaaagtgctaggattacaggtgtgagccactgttgcttaaacccaggagttcgaggctgcagtgcgctgtgatggcaccgctgtactccagcctgggtggcagagcgagaccctgtctccagaaaaaaaaaaaaagatttcagagagcagcctggcacctgagcggtggggggggggctgcagaatttgtggggccccagcgaagccaccgagtaacgcggagctgggtcagccctgaccgcttacagcccggccgtgctggcactccatgatgtgctgaagcagcagctgagcctgacgcagcagttcatccaggccagccggcacctgcacgcctccctcctgcgctccctggacgcggactccttccactaccacaccctggaggaagccaaagaggtgagcgcagctccccatgggcaggggcagggcagtaggggagcggcagctcccagaggccgggccgaagggatatgggccggggcctgggctccagcgctcagcccagggctgcagggatgcagtggggccatcacctgtccctgtggagggagcctcatttcctgccaccctgtggcaaaagctggtacagggtggggtgctgagctcctgcaccttgcagccagccccgcctgggctgtgtgacctcagactaaagggacctactgttcgtggcactgttttctcccatgggaggggtcctgtccctttccctgagcctcctgagacatccccgagatggggccagaggcggcccagctgttctcctcagcaatcaccctcacctctttttttaccctctaagaatttttatctgattaccagccaggtgccgtggctcacacctggtgctttgggaggctgtgatgggtggatcacttgaggtcaggcgtttgagaccagcccggccaacgtggtgaagccccatctctactaaaaatacaaaaattagccaggatggtgacgggcgcctgtagtcccagctactcaggaggctgaggcaggagagtcgcttgaacctgggaggtggaggttgtagtgagctgagatcgtgccactgcactccagctcgggtgacgagcaagactccgtctcaaaaaaactttttaaaatctgattaccaaaaattacgtggctgttttctgaaaatcttgttgcagagatgtgtaacctgcaagttctccttaatttcagaggtaactattaccaagctgatatatatactccttcagactcttgtatgaaccatagtatgcgtatttcttttttttaaaatttttttttgacggagttttgctcttgttgcccaggctggaatgcagtggtgtgatctcagctcactgcagccttcgcttcctgggatcaagcgattcttctacctcagcctctcaagtagctgggattacaggtgcctgccaccatgcccagctaatttttgggattacaggtgcgagccaccatgcctggccacgtatttctttatagaaatggcattatactatatgcagtcctttatggtgatctattcataaacttttttttttcttttgagactgagtttcactcttgttgcccaggctggggtgcaatggtgcaatctcagctcactgcaacctccgcctcctgggttcaagtgattctcttacctcaccttcctgagtagctgtgattacaggtgcgaaccaccatgcccagctaatttttcatatctttagtagagacagggtttctccatgttggtcaggctggtcttgaactcccgaccacaggtgatccacctgcctcggcctcccaaagtgctgggattataggcgtgagccaccgccccctgctttaaacattttacataacaaatttttcagtgtttatttctaaaaagtgatgttaaagccaggtgtggtggttcattcctgtaatcccagcactttgggaagctgaggcagggtgggtcgcttgagcccaggagttcatgaccagcctgggcaacatagcaagactccatctctattaaaaaatacaagaaaactagtttaagtttagcatagtggtgtgtgcccgtagtcccagctctctgggaggctgaggtgggaggatcacttgagctggggaggttgaggctgtagtgagggagaaagcgggactctgtctcaaacaaacaaccataatgcaataatacacaaaccaaatttactaagtatcaaggaatatccagtgttgagatttctgcttgtctgatttaaagttgtgtgttttgttccgatttggtaattcggatccaaagtccatactatccgatatgtcctttgagcctcttaatctagagcagcgaccggttctcaatgctgagcggttggggatcccctggaagccctgtgaaagcgatgctgggcccgcaagcaggcggggtgggcctggagctaggcgtttctcccacatgccccgggacgctgctttggaactgtgccgagtcccctgcatgccaggcctctcgtttccttgtggtttatctgctgaagagggcaggttgtgagtcccacgggtctctacaatgtcaactttgctcattgcagccctctgggggctttgaactcatgcctctgttgggcgtccatcagcccatccgatgcaggcagaagccatctgactgtgccacctggctgcagcccaccatagctcccagctgcttgctccaggcgcttctccctgatctcagccactccaagggcactcacaggcacccctccctttctctgtcagggctcacccctcgcagggctgaccctctaccctgtgttcccacagccccgtgcgccaacctgtcacacacatcctgtggttttacacttctgtcactgacaggagcctgctggggacaggtgctggctccactccctcctccagcaccctgtctcagagtgtactgaggtgacgatggtgatggcgtggtctgttctctgcctgacagtacattaggtgccacagacctgccccactgaccatggaggatgccctggaggaggtgaacaaggagctgtgagcgccagcaggtggagcttgacgtgacgtcttaacaaaaggtatcccgtcctgtgtactcagtgcacacacacgcacacaaacatagagctcatcagtgtccaagtgtgacgttccgtggtgggggcaggtggtactggggtgatggacacacacacacacagtcagcatccaggtgtgacattccatggtggggcaggtggtgctgcggtgagggccccagactcctctgagccaaatcccagctcagtgacagctctcccagcagcatgcccagctctatgacaccacaggccagtggaaatagaatttcagtggagctgtccccactcacagcaggacaggggccaccagcctctgcagagcagctccacccaggcaggtcctggcatcccagtgagccagagggagacagggtggatgggagaagccctgctcgagggtaaggacatgggaccaggtcagcacgctggggacgccatgtgagcccctggacacggcctctgaccccaggctgcacagctcaaaccaggacatgtgtctcctcactcagcccgtgcacacttctgacttacacatgtgcgggagaaaggtctttaaaaaaaggctttatttgaaggcaaaacaatgaaatccacaagaaattactaacagcacgtgtttacgttttatcctgaatcatacattttaacaattcacagctacaggaaatctagaacaaaatcaaatattcatcacgttgggttgaaaagttggaagattttgcatcttattgaaaagaatttttcaaaaatgtttctgtacaaatgaatggaattgcaccaggctgcccatggacaccaggtgtggccgattcccaacggtcacccaccagcttctggcaggagcagctcccctcctggcctcccctcccttcgggggtgtgaaatgaaatgatggagtggaaggcgctggctggggtcgggctccatgctctggatgggactgggccgtcgcacacgccagccggtgcagggttcttccaagtgcaaaactcaagcaggggacgcgacgggcacagactccgaggcagcgctcaacctgaagtgtcttaggctggtttcctgttagaatcttgtttcccagataacagcaaatggctacattccagaaaaaaaatatcaacttatacaactaaaataactgaactaagggccagtacgccttcgaagaattaggtttcagaatctcactgggcctcctctcaggtcagtattcttctttctagacctaaaccaaggagagtaaaaatgaaaaccctgcttcacttcgcaagtcaagtcaaagttttgtgtttctgtttttcaatccgcgggcagtcatggcactgggcttcggctttgtccctacacagccgaggggaagccaggtcagggccggtgggtgcggggagctggaggaaggagctggggtgccggctctggctcaggccaacccttcctgcacatgctcctcctggagcctaggaggaggcttcaatctgacttagggcagatgcacatccatcccttcgtggctgaagaatttactcgggcggagggtcttgtgttttttgcttcgctataaaggaaaacgagcctggggccctggtggctgcagcgcctcctggtgtggtttgtgggtggcacccgtgccctccacgccatggagcacggcgttcccactgggcatgcgctggtcttccttctcttcctgtggctctccacaagtggagacggtgtaagaactgagctgtcactgcaatcttcctctgccagtcagccaggaaggtcccacagccggcaccgctggccaccggcgcggctcccggcatgggcgcctacttacactcgtccctggccttcatgcgggcgatgaaggagtagctcttgttcctgcggtagttctcataggggtcatccagagccacgcccacgcctttatactggtcccacttatcccggacgtccccgcccttgatggggtcctggatcccttgctccttcgcaccgaggccgcctgagccgctccagcctggaaacagagacgcagtcacaaccacaacaaggcggaggcagatgggggtgcacgtggggggctgaatgtccagacaggcagtgtagacatgggaaatgggtagagagaacccgcaggccggccctgtctagagggtctgggtggagtcagaaccggcctgactccatccatccccacatgcactgaggaagagaaagcgctggtgactcccgggcccagcacgcgtgaggacccatcccgcgccctccccattccctcgccttacccatcttcaccagcatctgatggcctttgttctcttctccgagccttgagtcagggatgggaggcgccgaattagaacccagaccagcagaggaactaaaatcgagacaggttattctttttaagaagtaactgagacatttattggaatgacagtgatgaggacctcacagccgcagcttgcgtgcatgctcactgtcaccaggtgacaccgtatgcagattttgcgtctctacccgtttatcctgtctcagctagataagggggctccagacgctggcccccaccccacgctcagcattgagagcaggacacctccaacccagatggtggttagaaagcagaccccagttactgcctcaggcttcgccaagtggctactgtggtgaagggtgaggggtgccactgtccccgggctaatgctggcggcctcctaacacagtctcctaaccaccaatgtttccacattcacagcaaagcaccgcagcttcccagagttaccagcgcagcacttaagacaggatcttacggcggggtggggctcctggaccgtgaccggcgtcttcttcctggggagtacgacttggaccgggaccgcgactgggaccgggagcggcttctggaggagcgcgacctgctccgacttctgcagggaagggtgcccaagggtcagcagcagccaggcgtcgtggggaggccacaggaagaggcctcaggcactgccctgaggcagcctctgcctacctagatctggagcgggagtaggaacgggagcaggagcgcgaccttgaccttgagtacgagcctgaagacttggaggatcttgagttggagcgggaggaagaacgccctcgactcttggatctgctccgagacctcgagggtccgctgtggggagaggcctgatgatcaggtgccccagtggatgggctgcacccagcccaccctggccctcaggttcctagaccaccccagatgcaggggctctggctgtggatgtggcgccatagccacagcaacggtaccaagttcctaaatagtgtggccgagcctgctgctgtgtgaattcaggccttgtggaaaacaccgccccataggcacaggctgtgtgagggtggacgtgatgagtgtatctggggtctgctcccacccatcacaagctgtggaccctggccccccggccactgcagacatctgcgcttttacctgttcctcttctcctggcctttcctccgccgggcccgcatttttgctcggaagaactcatagaggccgttctgctcccagccttcactgtaagacacggcattccgtgtgtgaccacgtgacacccacccacaaggaagtcgtgaaaaagtcatcaggagttaatccacagaaccttggagagtacatggccctgtggctgtgggctccgagcatgggcgcagtagagcttggttcagtgttcccacagggctgtcctcctgcagcccagtggctcctctggtgcccacgcccttgccaccctgctgttccgctgaggtggtggggacccatggtctgtggaactgggaaacaggaacactgactcatgggtggacaggcctgcagcccagcacaggaaggaggggtgaccactgggaagggtgggctgagggccctgtggcagccggctgcttgagacgtgccgccgtgccacaccttccctaacttcttctgatgtgtctccattaaaacgcccttcattgagggccacgtgtgtgctgtgcctgtgacacacacttgtcactcaggcggggggagggcagtttctcctgagggacagccacattttctagcctggacagaaggtgtggttgcagggagccgggagaggggacagaggcctcccgcccaccccactgacctgggccccttacctgttcctgggcctgtcgtgggacggggggctgtagaaggcctccactgcagccagcagcctctcgctgggcggcatggggggtgggaggcggatgtctttagggtccaaaggcttgtactcgtgatcttccagctgcagcagagaaccccagctgtcaccatgcctgggcagagccctctcaggcccacccagggtctgcaaggagtggggtcagggcagggcccaggttcagtgtcaagggtaccctgggcaccagagctcctcatgcttccctcttggggatcccactctcttgtaggacctcagccacaccaaccatggtgggtcatagctgctctgaggctgatgacagtcacagggttctctcttcagaaaatcacccacaggggacatggtctccaaactcaggtgacctgaacaccctctggtttattcagacatgcagcgggcccctcacgtcaccctttgcttgcaatgcctaccctgggcccccgctcagaacagcctcagccccggccctggagccccctggcctgtatccttcttctgctccgtctctgtcctcctgttgaggccctgccctgcctggcttgcctgggcccccgcccgcagctctccctgctgcccatggctccgtgaagtctgcctggacttcaggtggatgtgtctgagggggtgggaagtggcagtggccagcatgcccttggaggccccaagccccggccctggcctccccaaccccccctttttttttttgagacggagtcctgctctcgcccaggctggagtgtagtggcgtgatctcggctcagtgcaagctccgcctcccgggttcatgccattctcctgcctcagcctcccgagcagctgggactacaggcgtctgccaccacgcctggctaattttttgtattttttaatagagacggggtttcaccgtgttagccaggatggtctcgatctcctgacctcgtgatccgcccgcctcggcctcccaaagtgctgggattacaggtgtgagccactacgcctggccagacctggccccttcttgcctcacctcttgccctatgctccggccatcccacagtggtaccagctgctgccagccctgcccggcttctccagggccacccccctccctgtgtgcttggtaggcacagctcacaggtggctccttctaagacattccctccatcagcagccctgggacaaggtgcttctgaggccctggaccaagaaggacgaagagaggactcgagcctcatagcctagctagccccacatggctgaagctccctgtggtgggagggataggaggggcagggcagggcagacatggtgtcgctcacagccacaccgtgctactccggttcggcacctcccactgacggatcagggtccctagggagtgggagatgaaggggagccccggaaggcacccggtcccgtgcattcacttttcacaaggagaaacggggaccagtatggtaagcgtgctcagcttggagcccactgtggggcattaccttcacgaggggggccatcagcccagcagggagatcgaagtagggcacattggggaccaggctggggtcatcgtggttgatgtggggtgggccctgtcgccgcatgtgtgggggctgcccgttgaagccatgggggggagggccgaagtcagggtgctggggtccagcccaaggcgggtgctcgttgatgccaggatgaggcatgcggtggccagggtggtggtgagggggccccatttctgcaaaacagagacttgcctcaggaccacaggccagtcaggatctcccaggcgacaagtgctggaggggaggggctcagtgaagggccaggagacgaacccctcctgggagcctgtccagcatcttctctcactgcttaagaccaggcagcaaggcaccgaggagccaggctccgaggggcctgtcccgcacccataggcacagccgagggagcttgaggctgagagaagagaaccccaaaaccccaaaactgcacggtgagggctaagttgtgaccctccgaatccatacgctgaggtcccagcccccagtagctcaggacggaactgtatttggagacagagccttcaaagacacaaatgagttaaaatgaagccatagtggcccgaatccaacgtgactgttgccgttataataagagattaggacacagacatgtagagagaagacggtcacctatgagccaaggagacaggcctccaagacactaacctgaacccgccacacctccaccttggacctccagcccccagatccttaagacaatacattccagctgttgaagccgtccaggctgtgggacttatcatgtcagcccaagccaaaaagtaaaagcaataaatgtgccaagcggtcttcaagctgcatttataatcagaaatgtatttaaagagagaaggctgggcatggtggctcacgcctgtaatctcagcactttgggaggccaaggcgggtagatcacttgaggcccagagtttgagaccagcctggccaacatggcgaaaccccatctactaaaaatacaaaaattagctgggcatagtgactgatgcctgtaatcccagctactgaggaggccaaggtggaagaatcacttgaacccaagaggaggctgcagtgagccgagactgtgccactgcactccagcctgcgtgacagtgaggctcagtctcaaaaaaacaacaaacaacaacaacaaaaggccaagcgaggtggctcacacctttcatcccggcactttgggaggccgaggcgggcggatcacctgaggtcaggagttcgagaccagcctgggcaacatggtgaaaccctgtctctactaaagacacaaaaaattagccaggcatggtggcgcacacctgtaatcccagctactcgggaggctgaggcaggagaatcatctgaatctgggaggcggaggttgcagtgagctgagattgtgccattgcactccagcctgggcaacagggtgagactctgtctcaaaaaaaaaaaaaagtactaaaagattagaaataaaatcaataacaaagatactaggcatggtggctcacatctgtagacccagctactctagaggctgaggtgggatgactgcttgagctcaggagtttgaaagtagcctggccaacatagcaagaccccatctctatttaaaataaaataaaatttttttaaaaaagaaaagtagttttttgttttttttttttgagacagcggtctgtcgcccagggtggagtacagtggtgcgatcacagctcaccgcaacctcagccttctgagcagctaggaccataggcgcccgacaccacgccaagtattgattttttaaacgaactaatacaacgggaaaactgatgcaaaaaacaagcagcagcagtaaaaagaacgaggccccgccctgccctcgccacgcccacccacggcaggaaccttttcctactggctctgcctcatctgcagccagccgggcctcatcagggcggcaaaactgagtctgtgcccccacttcctgagaacccaggccgggctcctcggacgtcccatgaccctgtgtctgtcactgtgcactcaggagcatggcagggccacaagcagcgccaccagcctgctcggcaggcgagccgtggatgcctccgccaggccctacccaggcgcccgtacactcaccggcagggaagtccccctgggggtagtcgaagcggtggggatagggcggccgctcgaaggggtgccgtggcgggaagtcgtcctgcatgaagcggggcgggaagcggttgaagttgtgggggtgcggaggctggttgaactgcgggtgctgctggtggggcgggaagggcccccggaagtgtgggggccgctgcatgcggaagggtggctcgcgctggcccccgccccagggcggctgctcgtgctggctgttccaggggccctcgaactggctgttccaggcggcgtcgggctggttgttccagggcgcgtcgcgctggccgttccagccggggtcaccgcgctgctcgccccacatgccctcatggctgttgttccagggggggcagtggggtgggccgccctggtggtgcgggtagggtggctgctctggcggctgcaagggaagggacaggcttgagccctgcgtggtctaggccctagtgctcggcagcatcacagcgctcggcagcatcacagcgctggctcagaccatggaggcgctgccctggccacgttgaggcgcctcctacgctgacgcctgcgaggatgctgggcacctgctctcagcccgcaccacatgctgctgcaaaatgaccagacacccaaccgctgcacccgcatctcagtcccggggctgtttctgccgctggggcgcgctgcacccgcacacaggccgcccgcgccacaaggtgctccccgctaccactgccagacaaacgccagctccctcgcccctcaggggcaggtgcagaggcacagacggtatcgcttctcagggcaccccaggcacccatggggcggggctcactctgacaccccctgccctgcctcactccccctctccccaaaagccgtctgctgggcagatacactgcggcacacacatccttgtcctggggtctgcttctggggactttcaaaccaagccagcatcttcctgtagactgaagacgggaggctcttccctcatcagcttctgctctggagacttaaagccaggagggcaaactccagcttgggcaggggaggggaggagcacagaggccaatgagaaggccggtgtctagggtcacagctgggtaactgcgctgacccctactaaggggaggctggcccaggctgccacattcaccaggcttccaagagaagccagagagccagatattaaatatcaggaactacttgtttttctttttcttaatttgagacagtctcgctctgttgcccaggctggagtgcagtggcgcgatcttggctcactgcaacttccacctcccgggttcaggtgattctcctgcctcagcttctcgagtagctgggattataggcgcctggcaccatgcccggctatttttttatctttagtagaggcgaggtttcaccacgttggccaggctggtctcaaactcctgacctcaaatgatctgcccacctcagcctcccaaagtgtgggattacaggcgttagccaccacgcccagccttgcttttcttttttagagacaaggtctcactctgtcacccaggctggaatgcagtggcatgaccatagctcaatgaagcctgaagtcctggctgaaccaatcttcctgcctcagaccactgtgtagctgggacgacaggtgtgcaccaccatgccagcttatttttattctttgtagagatggagtcttgccttgttgcccaggctggtcccaaactcctggcctcaagcaatcttcctgccttgagaaattacttttaaacgtgttaagaccccacatggccaagtcaagcaggccaggctgctgtttctcagtgtggactgcaggatgcactgctggcctagcgggcaccctcagtgaggggcgtgcccattgtcctgagcccaaccctctggtctgcaaaaagactgagcctggagacactaagggcctgtttccacacctacaaaacagggacaagaactgccccccccagcagagggtacctgcaaaacagccaccaccatctggctcctggccagcacttggaggtgggagctgtctttatgggggtgtccaatcttttgtgaggttcaatttcgtgtcctgaagctggggatgggaggctcaaagccacaaccaccaagtctcagtccagagccagtctccttgccatccttacacctgtccctgcagacagggagtcacctggaaaggccacgctgcgaagccaaccaggccccacgggcaagggggaaagtcacgccctggaagacccggggctgtgcctcagtgctgaaagtggacccagcacgctgcagggcatttcacagccatgctgtgccacataaggtggcccctgccttggcccaggggtatgtgacccatagcaaagctgcatctgaggcctcccaggggcaacacggctgacatttctgacattccccctttccttacaaaagcaccttgttctttccaggatgacaaaacactgacactcaactagcttaacctgtttaaggaggacaggaaacagaacaccctgccgtgccttgcagcgttaaactcccctgcactcgcaggacaatggtgatctatactacagagaagcccaaaccatcaaagctcggggaagggacgtgaagacctgtcacttgacctgtcccggagccacaggaagacagggctgtcactaacccagcataagctctgccacagaatatccctcattgttccccagtaagccactcaacgcccaccaactggcataggggaggctaccccatcaggccaagtgtgccccatctgctcccaccccaggttccaatcaatacctgctgctggccccaaggagccacggggtgaggctggtcaaaccaagggggcttgtttggtgggatctggtcgtgtggcccggggccccgggggccggcagctgcaggatcctggacccctcctggagcttcgtactctgaagagccaggcatctggatgggaggcttgctgtcatctaaatccaagtgacaggcagttagagcaggcctggcagcaggaggcgctgtctcctctccacactaccccagagcaaaccaggctaccgcttttagtgcccagtggatgatcgcttcaggacccactaaaaccatgactatcactggcttccaggaaggggacagggcgaggggaggtttcgaccttgaacatgacacacatctgtccttttcaaagctttacaagaaacaggcctcacttctgccttcttggtttgctgaagaatttctatccacactgaatttgattagacatctttactgtatctaattaaaaggtcatttccccacatctgttattttctattctatacaatcctcatattcctacaacaaatcttctttgatcagaatgtaattttaaaatcctttgctaggccgggtgcggtggctcacgcctgtaatcccagcactttgggaggctgaggtgggtggatcccaaggtcaggagatcgagaccatcctggctaacacggtgaaaccccgtctctactaaaaatacaaaaaagtagctgggcatggttgcgtgcgcctgtagtcctagctactcaggaggctgaggtaggagaatggcgtgaacccaggaagcggagcttgcagtgagctgagatcacgccactgcactccagcctgggcgacagagcaagactccatctcaaaaaaaaatcaaaaacaaaatcctttgctagattctgctaagatttccttcagtatttccgtgtctttttcagaagtgacactagattgtattttctgagacagggtctcgctttgttacccaggctggagtgcagtggtgtaaatgcagctcactgcagcctcaatctcatgggctcaagtgatcctcccacctcagcccccaagtagctgggacgacaggtgagcaccatttttctatttttagtagagacggggtttcaccatgttgcccaggctaatctcaaactcctgggctcaagcgatctgcccatcttggcctcccaaagtgctgggattacaagcgtaagccaccatgcctagccaattatattttcagtctgtgcattgtccttcctgcctgatgtaatagttaccctagtcttggggaatgatctgggtacctttcctctatttcttttctctgggaacaggaaacagatcttctgctgttcaggaatgggatggttgtagttttactctaggatcacctggctcgtgcttgtaaatggatgaaaacctgggcctaggagcaggcctgggacgagggaacaagaactgagtctgagggtggcagactgctttctgactacactcggtgcccagcctctgggggctgtttcctgggggcaggctgagctgagggagccccgtaccaggctgggtggtgggcgggatggcaggggcaggtgctggggccgggggtggagcaggcggtggaggcgtggccttgacttcagcctccatctgcggcatctggagctgctgctgctgctgttgctgctgctgctgctgctgggccaggctggtgacaaactcctcgtgctgcgtcttgagggtctggatctgctgctggaaggccagctgcaccggctggaccactgaggagtactcgttgatgagggtggcctgagagagagaagagcacccgctgctcagtatgcggccttggggctcgctgcctggcgccagaggacaaacgcctggaaagcagcagagcctgggggacctggggcaggtggacagggaaccgtcacgtgaaacagccaacacagtctgggcaatcagtgtgcgctgggatctggccagagatttggggatgaggatgttcgctgcagcgtgttttacgactccctgataacagaacgagcaacgacagccgtgtcctggccgcttcgtggctgctcagcgaacactgcccaccaacattctgggacacgctcatgggctctgcctcccactcgccatgtggctctcagcaagaggggctgccacagcctaagccacgtctgggcttcctcatgcttccaccacaccggaacatgcctgaccaccagagcaaatgggccatgtgcaatgactccgaaaggccgcctggttctagtgttccaggaaagtcagggagacacacctaaggcctgggaaatgtcacctgggactctctggtcaacacacactggctactcctagcacaggcaggggacatgggctctctggctgctggggtggcagctgctgtccccacactcccaaaccctcctggggaacccgccccagctctagggtgaggtgtgggtgggcagggacactcacctggtactgaccaagccccagggctgggctctgtagctgctgaatgatggagtcatcgaagtagccgtttttctcccagagctgcaggagctggcggtgggaggagagagaggccgggtcagtggggaggggaaaggcctgtgtgtcccggtcttgcccaacccccggcccggggcccacgcacccgggcgatcttctgctgcttgtcttcctccacggccaagaagctggtgcagtagatgggcaccacgaccttctgcagggcggccagcagctcccgggcctgcttgcgctggctgtgagggagagactttccgcgcgtcagggccctggggcgggacccggccacgcgcccgttaccatcgcggctccagcctcagcgccctctgccttctcgggaatcgggtccccaacccggtcagggcgatggctgggctcccacgagacctgtgctggtgcctgggctcgaggaagggacagatggaaaaacagcaagcaggggagggagagaacgtggcctggggccgttctgagcaaggccttttggtccagtccccttgataggaaataaccttccctccttccctcttgggtggcgctgcgggtgaagggatatgggccggcgggagcccctgcctgtgtatgatgggcgggatgggactgctgcggagtgggggtcttgtccttgtcactcactatgcacaaggaaacctcggcccaggccaggcctcttgggagaaggagggagggtgcccagtccctcaggaacctagaacactttagaagagtgaccggatgcccagcggggggaggcgccgggcccatgtcctctcagggctgctgtgcagtgctgcacaggacactgtgcatacctggcctgggaggcccctgccgctgcgcagggagatggctgcccctggggagggacgcaagacaggaggggagcagctggaagcccctcagccctcagcttgccgcagggggctcaggggagcaagggcctgggctgggcgagcagcacttggcttcggacagagtagagctagagaggcgcgtggctggagaatgcgggaaactgtgcatccgtgcaaggcacccgactcagaggcagggagaaatggaggcatgaggaggagcagaagggcagagctggtgccgagccgcaactcacttcccagcaggagagaaacagggactgaggtggggaggcaagagggactcaggcagtgctgcatgtgatagatggggcgagatgggtgctggcagcctggcccactgtagaggcacacgaggcgccaggccaggactgctgcccgctaggctcagtagcaatgcttgtctcctcccgcacgtgcgggcctttggcctggggttctattgttttttttttcttttttgctaatttttgtgagaagggccccagtgaccctgtagaaggaaatacccacccaaccttggggagggtggagacagcaacagtgggaagggtgagggctgggtggggacagagggtcggcagatgtggctctgttgaagcctgagagatgggtcagggctggagaaggggatcccaaaggagggtcctgatggctgagcaaagtcaggtgaccgcgtgtgtgtgcgtgcaaatcagtgacgagggcaggagacagacacagaggccaaggaggccgtggctgagaaggcaacaaggagacgccaagaagctgccccatgagaggaaggagtgcaggggacagtggcccccaggagacagcaatgtgacaggtgaggccggggtctaggggagaggacagggcatgcagcgaaggtgcacaggacacctagacctcgcagtcctggagacagaagcctggtggctcacagagaccccccacccggggtccccggacaagtgccccctagtctcgggacaggccaagccaagctaccgaccggagcaagcggccacccaggagggttgaggaggagcgcgaggaagtggcgctctgggcacggggtggcggcgctcaccagtggtgcagcacgtcattgatcaggtagatgaggtgcagccgcagctcgaagtgtgccccatcagccgtgatgcggttccggaggtggccggccatcagctcacagtgcggcggggacttggcattgctgaacatccagttcttcccggcctgcaacaaccgagccaatgacgagtgagcagggccgcggctcccccaggcacccactgcatccctgagagcgcgtcaccatcagctcagggaaggacacaccatgagcgtggggggcacagggtcccacagcctcaggagctccaggcgggagggaagggcacccattgtaacagcccttagcccagattggctacgacaggccctgcctcagggagggaccaagggaaagctgggctctgggaagtgctggcccctcaccgagatggcgtccttggtgcacgtgtcgatgatgggctgcaggaggttgtcaaactcgttcatgtctagctgggtctcctccagaagcttctgcatctgctgctccaccgcgtgggccacggccgctgtcacttgctcctgcgggcgggggtcggtggggtcgagaacacatgaggagggacccgcagcctgagccctccggcctggctcagcaggggcggggtggggacatggtggcgatgcccggactctgggctgctctggccatcagctcccttgcttgtccccagcaggaggagattctgtctctcatgcctgccgtgaatctgtgacagtccctcctggagtgggcagggcactgacaggacataccaggagacaacacctgccctccaggtaaccaaggaaaacactgcagcccagaggaacaaacaacctctgcaaaccaactcaacaaaaaacaaaggcggggcgcggtggctcatgcctgtaatcccagcactttgggaggctgaggcgggaggatcgcttgagcccaggagctccagaccacctgggcaacgtagcgaaacctcatctctacaaaaaataaaatacaaattagttgagcatggtagtgtgtgcctgtgttcccaactacttgggaggctgaggcggaaggattgctggaacccaggagttcaaagttaaacagtgagctgtgactgtaccactgcactccagcctgagtgacacagcaagaccttgtctctaacaacaacaaaacaacaacaacaacaacaacaaaaagaaaagaaaagaaaaaaaaagacaaatgaggcatggtgtgaacgacaggcaatagaagaagaggatacacccatggcctctagtgaagcaagaagggggcaatctcattcctcaagaggaaacaccggttaaagtgcgactggtaaaaacagagctgccatgcggaccagcggtcagttacggctggtcaaggcaggcctcccactccatgatgaacagaagctgagggtgagcattctggaactttcttttcttttcttttttttttttttgagatggaatctcgctctgtcgcccaggctgaagtgcaatggcataatctcagctcactgcaaccgccacttcccgggttcaagcaattctgcctcagtctcccgcgtagctgggactacagacacctgtcactgcacccagctaatttttgtattttttactagagacagggtttcaccatattggccatgctggtctcaaactcctgaccctgtgatccgcctgccttggcctcccagagtgctgggattataggctgagccactgtgcccagctggaattttctgagagcaatatgacagtgtgattttatgccctgaacctagtactgagcgtggggttggtgttttggaggtttggtattctattcctctcatttttctggcaatgcacttgtagtattttatttatttattttttctgagactgagtcttgctcagtcacccaggctggagtgcagtggtgcaatctcagctcatgcaaccttttcctcccaggttgaagcaattctcctgcctcagcctcccaagtagctgggattacaggcgtgcaccaccacgcccagctaatttttgtatttttcatagagacagggtttcatcatgttgaccaggctagcctcgaactcctgacctcatgatctgcccatctcagcctcccaaagtgctgggattacaggtgtgagccaccacacccagccaatgcacctgtattctatttggcgaaagttatcaaactgttggaccaggaaggacaaaagggtccttctggccaggtggatcacctgaggtcaggaatttgagaccagcctggccaacctggtgaaactccatctctactacaaatagaaaaattagccgggtgtggtggtgcatgcctgtaatctcagctactccagaggctgaggcaggagaatcgtttgaactcgggaggtaggggctgcagtgagctgagatcacgcctctgcactccagcctgggcgacagaacaagacttaaaaaaaaaaaagggtccttccccaaccaacagctccaggtgacctagctactgtgtggtggggccaatggtaggcaccagaggctgcctggccacagccattagggagcttcaaggtgcatacgtgccccacagtcccactcaggggggtccaccccagggtgatgggtgcacgcacgtccagtggcttcactgagatgagaagcagcctctgtgtctggcatcagggctgggggtgacagtggctgacatgcaccgagccctgggtggcagggggggccctgtcctcactgacacctgttattcattctgatgagcagacgcaaaaacagaggcacaggggagctgctggtgtctggccgaggaggcggcgggcccatacctgtctgagcgccagcaagtgctgctcctgctgctggaggttccactggctctgctggatgagctcgtccatggatggcgcgccctgggccggcgggatgggcgcggcgggggccagcgggggctgtggcaggggtggcatggtggcggctggctccagctccggggtctgctgcttgcagatgactggagggagaggaggaggggtgccccatgagaatgcagatgggggtctaggtgtccccttggccacctctcagccacaggggcctccccctccccagggactcaccatccacgagggcctgttcatagcctcatgcccacgcaaaccagctcctcctagtctcgggtcctgccctccctctcacaggatcccagcctcagcattccatcttcgggccgtcccctcctcggagaacctaggaagtcccctggccgctctctcgccagcaccatccagtccttgcgcagtgtccttccggtgcaagctaagcttgcctgcccacctcctcacccacctaggccccacctgatgcagaacccaggcctcagtacctctcatcctccgacctcctcggccactccctgacctctgccacttaagctacccattgactgttaagatgtcacagccaccgggcctctgcacatctggccagaaaggcacgaagccgcacccccgagcgcacactgcggcctcccccacacctgccttgtccttctactgactctccttgcttctccagcccttggggacagagacccctctgcattcaggggtgcatccagtttgaggcagcagtgagacacccattctgccggcagaagcctgggtcagggtgggcgcaggtcccaactctggccagatggggcaggtggtgaggtctctgaggaagggacccggctcataaggaggccctggacaagatgacctgcctctctctccgtcttggggccgcctggtctaaatgtgaccaggtacccctggagccctccagagccccactccaaggggaccaggacaaagccaaagataagggaggtggggtgtcaggtggaaggtgtcgcccctcactgggcgctcaagtcaagtctcggggctgactgtgccctccagtttgtgcacccaaagccaccctacaggatgacccccaacttctgcactgaatcccacccctcccactgtctgagggacactgcttattgatatttcttctatctcttatttctccaactcctccctctttacccgtccctccccagcagcatctaaacacattgggctgggcatgatggctcacgcctataatcccagcactttgggaggacaaggcgggtgatcacctgaggtcaggagttcgagaccagcctggccaacatggccctgtctctactgaaaatgcaaaaaattagtcgggcgtggtggcgggcacctgtaatcccagctacctgagaggctgaggcaggagaattgcttgagcttgcaaggtggaggttgcagtgagccgagatggcgccactgcactccagtgtgggtgacagagtgagactccatctcaaaaaataaaaaaggaaataaataaacacatcagaatattctgggttggaaacttctccctttaccccatgatccctctctaaacgatttctcagacaagactcactccagatcttcacctcccctttatctcagcctggtgcctgcttgccactccccgcacccccctccttcccccaggcagctgaggacaccctcactcaactcagccccccgggcctgtcgcaggtgcttgcctcccttggcctccatgtgttcgccccctcagtccctttctccccctttaccaacccctctcccgttggaccctcacatgctggggtgcgcggcctgtgttctgagccctgtcctccgctctacgcaaccgccgggcaacatgagctactcattcctgtggctgcgattgtgcatggtgtgattcctaaatccatcatctccattctggattcctgagctttggccctaaccaccaactgcacggcccactgtgtttccaaggggcctgtgtttcctctcaccccctacacctatgtcccctcctgtgctccccgcaccatggttggcaccaccatctgcccagaaacccaggccagaagtagcatgtgcctcccagtgacgagccacatagtgtcaaggcggcctccgagacatcactccaatcagtctatgtccccgctgtcaccaccatggatctgctgtcacctgcgtcaccccagaaccggtcttcctgcatcaggtcccatccctctacctctttttgacatggcagtcatggtattgccacttatggagtggtccctgggctacccagcggtgacagacggttatggaaccagaaagggagcatttcaaaacctttctagcagcgtgatggttcacggtccacattgttactgtgctttgcagaagttttggtccacacacaacaggttagaaacttaaaacacaacaccagaaatggtccttcaccacagagttcgtgaagctccattctacaacagttgaggcccaggctttaaggcgtggggtgcagaactggctgtactgtggctaacccagcttcacaacacagacctaaaccttccacgagtctctcccacgcttccaggatacactcctcactcctctccaagccaggtccccgactcctccccaagccaggcctccaactcctccccaagccaggctcccaattctgcacccccacctctggccactccaagaacccctcctactctgggcttcagccaccctaagctctgggttccccattccctccaagggctccttcctctgcccggaacacttttctccccttgttttcacctggccaactccaacacaccctttacatctagccaagatatcatcacccacagaaagcacttcttggctgggtacgatggctcacgcctgtaatcccagcactttgggaagccaaggtgggcggatcatgagttcaagagatcaagaccatcctggccaacatggtgaaaccacatctctactaaaaatacaaaaattagctgggtgtggtggcgcacgcctgtagtcccagctacttgggaggctgaggcaggagaatcgcttgaatctgggaggcagaggttgcagtgagccaagatcttgccactgtactccagcctgggcaacaagagcaagactccatctccaaaaaaaaaagaaagcacttcttggcttcaatcttcctgggctataagcataagcaccctctccttcctcataatggcaccagcttccaagtggccacccccccgccccagaaagggaaagcagcccttagctcagtcacccaagccaaagcaccgtctgaggtgtcttcctcccctgctcattacaccatcaggtcgtcaatatgcaactggcgcccaagttcatggattctaccccttcaccccacctgccccccatgctccctccctcaggctcaacctactgacttaattcagaccccaccatctctcacctaaacaactgccctgtttgctcccctgcaggcctcactgctccccaggctggtccctgtagcttgtcctacaccaccggccacacaacccaagccaccctctcccttgtttaaaactcttgtggcttcccgctgcctttagaaacggtttttttttttttttttttgagacggagtctcgctctgtcgcccaggctggagtgcagtggtgcgatctcggctcactgcaagctctgcctcccaggttcacgccattctcctgcctcagcctcccaagtagctgggactacaggcgcccgctaccacgcctggctaattttttgtatttttagtagagacggggtttcaccgtgttagccaggatggtctcgatctcctgacctcgtgatccgcccgcctcggcctcccaaagtgctgggattacaggcgtgagccaccgcgcccggcctagcaacggttttaaacttggtgtgctggggctaaggaaggatcgctctagaaacacataagcacatacaatattttgcttacgatttcaggcagctgatctctctccaccccacccccgcatctcaaacctaaataggcatcagaaaaacccctggattgagtgaaaaaacccaaacttttcccctggcagttaacactccaggtcaaactcttccctcatacaagcacattcttttattaaatagattctctactatgtcacccaggctggagtgcagtggctatttacaggcgtgaggccactactgatcggcacaggagtttcgacctgctccatttctgacctgggccagttcaccaccccttagacagtcgagtggtccccagctcccagggggtcaccatactgacactgaacttactgcacacactcaatcgacacagcgcactacagccctgaactcccgggctcaagcaaccctccagcctcagcctcttgagtagctgggggtacggtgtgtgccactgtgcctggcaatacacacataaactctctctctgtttcttgttcaagaaactgcccctttgcaatgttctactctctcagcctttcaagtttttgttgttgttgttgttagatggagtttcgctgtctcccaggctagagtgcagtggcacgatcttggctcactgcaacctccacctcccaggttcaagcgattctcctgcctcagcctcccgggtagctgggactacaggtgcccaccaccatgcctggctaattttttttgtatttttagtagagatggggtttcaccatgttggccaggctggtctcgaactcctgacctcaagtgatccgcctgactcagcctcctaaagtgctgggattacaggcacaagccactgggcctggcctcctttcaagctgctttttttttttagatggagtctcattctgtcacccaggctggagcgcaatggtgtggtctcggctcaatgcaacctccagctcccaggttcaagcgattcttctgcctcagcctctccagtagctgggactacaggtgtgtgccaccacacctgactaagttttgtaattttagtagagatagggtttcactatgttagccaggctgttctcagactcctaacctcaagtgatctgcccgcttcagcctcccaaagtgctgggattacaggcgtcagccactacgcctggcctcctttcaagccttttctttttctttctttcttttttttttttgagatggagtcttactctgtcactcagactgcagtgcaatggcgtggtcttggcttaccgcaacctccacctcccgggttcaagcgattctcccgcctcagcctcccaagtagctgggactacaggcgcgggccaccacacccggctaatttttgtatttttcgtagaaacagggtttcactatgttggccaggctggtctcagactcctaacctcaagtgatctgcccgccttggactcccaaagtgctgtgattacagtatgagccactgcaacaggcctcctttcaagctgtttaatcgaacaccaactgtgtgttatgtattaagggacaatgaccttgtaccttaatacaagacgagcgtgtagtcccctgaactacacgctcgccgaagccaaacagaccttgtttgggtcattgtaccttaatacataacacacaattggcgttcgatcaaacagcggacaaccacctctcaatgtccatctacctggcaaactcctagttattcatttaaacaatctagagacggggttgggtactgaacgtgacagatgtgatacctgccctgagcagccgcaccacctggtgactatccattattcaaaggccagctctgcttcctaactttaaacttctttagagcaggactggaatcctgttgcctaaatgaacgaacattgataaacacttgccaataactaaaactcagagggataattctttttgatttctgctgcaggcatctgaaatgcacaaaaccttgctggacccacagggagacggcaaagggggctggacagtgcctgtcccatggactcccatccggcctctatcacttcctccctagaaaacactaaaacaatcacgctactcctgctaatctccgtcatcagtctgcaaaacaacagcaaaatccctgatccagagcccaggggggaggatcgaaaacctcgttgttctccattacagtggcacccagcagccgctctgtgcagggccgtgggaacagcggaacagggatcgtgtggaccgagctgctccacttcaaagaataaacgacccgaaagaaagaggtttgtggcagagcccggactggaatccgagaaaggaagcgctcgatgggacggcctgagtgccggaggggactcacgctgctgctgctccagcgccagcttgcacttgtagtaactgtagaattcgcctccgaaaagaaacgagaatttggggttgtccttctgcttctccatagtcatcttctcaaactcgggcccattgcgagccacgaactgggcgagcttgtcgatgacatttcgaagctcctggtctggaggacggagaaaaggccacgcggggcgtcagcgaggaccgcccaaagccgggggactcggcgccccagcccccgtccgccttgccggggaccccaagggggtgggccccgaagaggccgcccttgtacgggtcccgataggggccacacgctcgccgggaatgcggggacccacgggagaggccgcaggcgaagccgcgaggccgagccccgccccctcccagacccggggactccgggaggcggggccggccaataggaggttccggggagagagaaacggtctctcggccggtttgggtctcaccatcggggggcagcggcatctccatggctccggccgcggggaacgtcctccggcgccacacgatcgaccaccagcgccgtctgcggaagccggccggaagtggcgcgagggagccgtttacggcgggcttctagggccgcttccgcccgccacttacggccgtcgctgggaaactccggaagtgagagcgggaggcaggcgggaagaagccgcgcgatgcctggcgcgcgggaggggctagcgacgcgcacgcgcagaagtttcctgacactttcgcagagtgggtccccgtcgcgcggcgccgcggaaaggctggaacggcgcgggtgggtgttagtcgagaccggggggcgcggggcgtgccccttggtcggcgtcgcagcccgatgggctggctggttgctacctccgggcgaccaggggcctggggacttcgtgcctgggccagggtctctttcctttcgcgggcacagtgaggagactgcgaggtgaggtgcgtccgggtggatcccgggctgcggcgactgtcacattctccccggccagaccggaggtggagcagaactgggggcgacgagcttgactgggattgcagctggacgtatttaggttcaaaacatcctcctcctggctttcttccgctccactctttggtcaggaagactggggcggggtaccccccaacccatgccctcaaattgctggcctagagggcacagcgcctttctaaaagctgcagttgggttgcctctaaaataatgaagctaacccttgctaattgtggggaaaagatagccagaagcagcaaatttctgctgtggacgtccgatataaactgatcctcttgagatggttaatgcttagttggctatacctgccccccgcccccgccgcttttttttcctttatccgtttttttttttcttttttcttgagacaaggtcttgctctgtggcccacgctggagtgcagtgtcatgatcatagctcactagccctgaactcctgtgctcaagtaatcctcccgcctcggcctcccaaagtgctaggattataggcatgagctactttacccagcctgtttttttctgtgcaaataaatgcacatgtattttagattagtttcatttttattgttaacagcatttttccaccagatgcttatggattgacaactctacatcaagtgttgctgtaggctaggaatcaacaaaactttttgtataaaagggacagaaagcaaatattttagactctgcaggtcaggaggcaagatcaaggatttttttttttctaaatgtcctctagttcatattttctcatgaagatcgaggatcttaattgtttggtttttttttttttttgagacacagtcttgctctctctcgcccaagctggagtgcagtggtgtgatctcggttcactgcaacctctgcctcccgtgctcaagcaattctcctgcctcagcctccaggggagctgggactacaggtgcgcaccaccacgcccggctaatttttgcatttttagtagagatggggtttcaccaggttggccatgctggtcttgaactcctgacctcacatgatctgcctgccttggcctcccagactgctgggattacaggtgtgagccaccctacccagccttatttaggtatttctataaccagaaagaaaagttcataaaatttttgttggtgaaaatcaaaatatgataactgagtagtttcttaaatacaagttgctacagtttgaatgtttgttcctaatccccagtgaaacagtattaagaggtggagcctttaagaggtgattgggttatgaggtcgtgccattcatgtgttaatggataaataggttatcatgggagtgggactggtttggagcttgcagtgagctgagattgcaccactgcactccagcctgggcgacagagtgagactccatctcaaaaaaaaaaaataaataaaataaataaaataaaataaaaagaggaagaaaggccaggctcagtggctcatgcctgtaattccagcaccttgggaggccaaggcacgcagatcacctgaggtcaggagttcgagaccagcctggccaacatggagaaatcccatctctactaaaaatacaaaaattagccgggcatggtggcggatgcctgtaatcccatctacttgggaggctgaggcacgagaatcacttggacccagaaggcaaaggttgaggtggaggttacagtgagccaaagtcgtgccactgcactccagcctgggcaacagagcaggactccgtttcaaaaaaaaaaggaagagagacctgagcttgcacacagcctgctagccatgtgatgccctgtgctacctcaagactctgcagagtccccaccagcaagaaggcccttgattttggatatctcagcctccagaactgtaagaaataaatttctcttctttaaaaattgcccagtctcaggtgttcttttatagcgatgcaaaatggactaagacccaagtctattcataagagtggaattcttttgggggataacatttcacttaattggggctcccagttgtatttcctgtcgtcaattgatggtacatgttcacctttgaaaaaccttcctggctcacaaaaacaggcggccagttggatgtggtttatagatacggtcatgcacaactcagatctcagctctgctctcaggggactcagtctatggcggggaagagtcccaaaatcagtaaacaaatatatcatctcaaaggtgttattaagaagaggatgctgagactatgatacaagggagggtgaggcccaggctgatagggttgtcaggaaaggctctcgaggtgaggtctgcactatgatctgaacaaggggccagctctaaacaccctaaacaggcagagagaacagtgtgggatcatactgtttatttaaaaaatattttttattttttattttttttgagatggagtttcactcttgttgcccaggctggagtgcaatggcgtgatcgcggctcaccacagcctccgcctcccgggttcaagcaattctcctgcttcagcctctcgagtagctgggattacaggcatgcgacaccacacccggctagttttttatttttagtagagatggggtttctgcctgttggtcagactggcctcaaactcccaacctcaggtgatccacccgcctcagcttcccaaagtgctgggattacaggcatgagccaccgtgcctggccctaaattttttatatatttttttgagacggagtcctgtctgttgcccagcctagagtgctgtggttcaatctcggctcactgcaccttccgcctcccacactcaagtgattctcctgcctcagcctcctaagtagatgggattacaggcgcctgccatcacacccagctaatctttgtatttttagtaaaaacggggtttcaccatgttggccaggctggtcttgaactcctgacctcaactgatttgcctgccctggcttcctaaagtgcagggattacaggcatgagccaccgtgcccagcccatactatttgaagaacagtcagtaatccagagtgtgggcacttttcatgccaggtaaaatctacatgaagaagttttttttgttttttttgttttttttttttttgagacagagtcttgctctgtcacccaggctggagtgcagtggtgtgatctctgctcactgcaacttctgcctctggggttcaagcaattctgcctcagcctcccgagtagctgggactacaggtgcacaccacacccagctaatttttttttttttctgaggagtctcactctgttgcccagaccggagtccagtggtgcagtctctgctcactgcaagctccacctcccgggttcacaccattctcctgcctcagcctcccgagtagctgggactacaggcacccgccaccgcgcccggctaattttttgtatttttagtagagacggggtttcaccgtgttagccaggatggtctcaatctcctgacctcgtgatccgcccacctcggcctcccaaagtgctgggattacaggcgtgagccactgcgcccggcctacccccagctaatttttgtatttttagtagagatggtttcaccatgttggccaggctggtctaaaactcctgacctcaggtgatccacctgcctcggcctcccaaagtgctgggattacaggtgtgagccaccgtgcccggctacatcaaggagttttaacttgggatctccaatggatagatttcagagaaccatgaacaaaattggtagcaaaataaatgcctttttgagggttgaagatacacagcgtttacaggattcttaataggctcctcaatcagaacaggttaatgaatctgtattgtcatttttttttttttttagacagagtctcactctgttgcctaggctggagtgcagtagcatgatctcggctcactgcaacctccgcctcccaagttcaagagattctcctgcctcagcctcctgagtagctgggattataggcatgtgccatgacacccagctaatttttgtatttttagtagagacagggtttcaccatgctggccaggctggtcttgaactcctgacctcgtgatccacccgcctcggcctcctaaagtgttggcatgacagacgtgagctgctgcgcccgggcgatgttgtgatttttgaggctgcataggatgccatggtgtggactcaccacaatttactgaagtgagactctagtctcctggcttggttccatttttaggccactgttaaaagtgtcttaagtgtatatagggttgggcgtggaggttcacgcctgtaatcccaggacttttggaggccaaggcgggcagatcacttgaggccaggagttcgagaccagcctggccaacatggagaaatcccgtttctactaaaaaataaataattagccgggcgtggtggcacgtgcctgtaatcccagctactcgggaggctgaggcaggagactcacttgagtctggaggtggaggttgtagtaagccgagactgcaccactgtactctagcctgggcaacagagtgactctgtctcaaaaaaaaagtgtcttagtagatacaaaccttgtgtagagtcaaagggtgtgcaaattcaatactgagattgctcagctaccttctagaaagttagtacacccacggtcactactttcatacatttgtttcagattgtttaaaatgctgctgggtatggtggctcatgcctgtaatcccagcactttgggaggctgaggcaggcggctcacttaagtcaggatttcgagaccagcctggccaacatggtgaaaccccatctctactaaaaatacaaaaattagccgggcgtgggggcaggcacctttaattccagctaatcaggaggctgaggcaggataatcacttgaacctgggaggggaaggttgcagcaaaccgagattgcgccactgccctctagcctgggtgacagagcgagactctgtctcaaaacaaaaacagaaacaaaaaagccatgtatctgagattgaaaatataagcctcagagggacctctaccaagctcatttcaaagggtcaaatcagaatctactggtcagaagaaagcagtagaaagagctggtagactggctgctgcagatactctccagcaagtaaagtggacacctcgagtgagatgagccttgtgaagggactcacctaagcagcaacatggagggccaggtgcactgagggggttctgtggcccatatgtctgctagttgtgatttcttgagtctggaccccttaatcggaatggtctcattgtggtcagggtcagatggtaactaaagttttgtggggttttattgaagacagggtctcgctctgtcacccaggctggagtgtagcagtgcgatctcggctcactgcaacctctgcctcccacgttcaagcgattctcctgcctcagcctcccaagtagctgggattacaggagcgtgccaccacgcctggctagttttttgtatttttagtcgagatgggctttcactatgttggccaggctggttttgcactcctgacctcaggtgatctgcccaccttggcttcccaaaatattaggattacaggcgtaagccctgccacctccccctagtcccccatcccccgggtcttagcatttctaagtagctcccatgtgctacttagttacatacctgtcatttaggctgagtgctttgaaggtaggaggcttacatatctgtttcctgctgcttgacacagccagtgcttagtaaatcactaaacaaaaagattatgaatgaaaaggacatgggcaacagtttcagcagaaactcaaaccctttctgtctgaaagaaatcctttgctggggatggcttaagtaatggggaaaaatgggttctggagccagatttaagcagttatgtaatcccagatgagtgacttgaccccgttgggcctcattttcacctgaaaaacaaggctaataaaactcacaaaggtatcgtgtgtgaaaagctcaccactgagctgggcatgtagcaggtacacagtcttggctgtcaatactcaaaaatggcttcaggctgggcacggtggctcacacctgtaatcccaacactatgggagccaaggcaggtggatcacttgagcccaggagttccggaccagcctgggtaacacagagccccatctctaaaaatattttaaaaattagctgggtgtggtagtgtacacctggaccagctacttgggaggctgaggcaggggactggaatgtagggtttggtgctgcaggaagctgtggtcgtgccaccgcagtccagcttgggtaataaggtgagaccctgtctcttaaaccaaaaacataacaggccagatagcttgagccccagagtttgagactagcctgggcaacaaggtgaaactccatctttacaaaaaatacaaaaattagccaggtttggtggcacatgcctgtatcccagctacttgggaggctgaggcggaaggatcccttgagtctgggaggttgtggctgctgagagccgggattgcgccactgtactccagcctgggcgacagaatgagatcctgtctcaaaaaacatgaaacataccaaaaaaaaaaaaaaaagtttcataagcacagctgccacaatgttcctggacttcccatgttattccgttcaataaagtcacgtcattaatttagctgtgatcctattttcattgtatcatctaatcaattcacaaattgcacgtccttatttttggctcagaagaaaaaacaaaggttgcagtaaatccagacgtgacagccaagttggcttgctctttctcctccttccacattttgttgctgggcacactgaagacagggccactcaaaaagagaccctcgctgacaaatcgggaccaattttgattccctggaaaccatcatttatttttggtaaatgccagtgaggaatatacacgtcattcctgcagaaaagtctatagcatttaagtcttgaaaacaggtgacaattgaaaaacattataatattttcaggtcttttaataattcaatgctctgtgtccttcaggctgtgagaccctaaggtattggggtctggtaatgtcccagctatagcaaagggcctgttgggtgacataggacaaatatacagcaaaattcagaaactgcaagtgcttcctcacttgaacggatctggcccctttgtggtaggggcttgactgttcctagaatgaatgacttaaaataaggtggttaaaaattctgcagtgagtctcgccatggtgaacaaacatgattcagaaatgcctccttctataaaatgaaggagctgggttggagtcagtattaccagccagaccataccctgatgggtaaaggaaattctctaccacagagctcagcagtgaggtggctgagaggaaggcaggcctgcagatgaaagcgtgggagtggagcatgtggggcgggcactgtccggctgggaaaacccagccttcaagaggccattgtcaatcaggctgggcacggtggctcatgcctgtcatcctagcactttgggaggccaaggtgggcggatcatttgaggccaggagttcgagaccagcctggccaacatggtgaaaccctgtctctactaaaaacacaaaaaattagccagccgtggtggtgcatgcctgtaatcccagctactcgggaggctgaggcacgagaatcacctgaacccgggggatggaggttgtagtgagctgagactgcgccactgcactccagcctgagcaacaaagcaagactccatcttggcagggggcggggggatgtggaccttcaagtctcagaaatatgtgtttgtcttttgatctgctgatttggtgtaacgtgattgcctcattcattccagtgtacgtacttgctgtaaatttatatacagaattaaatagcccatttattaatttataaaccataataaaaccagacagtcatttcccgtcaccagcagatcttgcattggaaaaggaaaataatatacaaatttcagcaacttcagagatttcaggaagcctgaatggaggtcgaattcattttggagttcaataatatgttcaaagaatcaggtactatatataatcatatagacaactcccgtaatatctccgcagtgcaaaattatccctgtttcttgtcattcaccagtgagaaaaatccaactgcagacttgactgccttcggtgaaggcacacggcaagttcttctgacaaataacaccctttgggattgactcttcacgttttacacagcaattgtctcagcttgggaccaaagtatttacaaagcaagcgaacaagagacgaagcaagagggacacttctgaggccggtggtgcggaaactcaccgccaaacagggtggggggccagtcacctcttcaggagtgtcccatgtgtcagctgacataacatcttaaatacagaattccaattgaaagaaaaacaaacaacaacaaaagaaacaccagtcaagcataagtgatgttacttcctctctgaacagggaaacatctcgctcgctgggagataaaaggtaaatctctcatttgctgctctcttcccctaagtgccagcaagaagctgggtgtggtgatgaagaaagaaggcagccatcacctaagaccccacaagccaagccgtggtcccctccgtgagggcacggtcctttcatgaagccgtaaaagagaccacagctcggacctgagcactcagggttacctactggggtcttgtcatattccttatgttgatttctgccaagacccaaactgattccttttttttttttttttttttgagacagagtctcactctgtcaccaaggctggagtgcagtggtgtgatctcagctcgctgaaacctccacctcctgggctcaagtgattctcctgcctcagcctcccaagtagctgggattacaggcaggtgccaccatgcctggctaatttttgttttagtagagatggggtttcaccatgttggccagggtggtctcaaactccagtgatccacccacctcagcctcccaaagtgctgagattacaggcatgagccaccacgcctggccccaaactgactcttgaccaaagaatctgatttggcaaaccaaatcttagtgcagtgttcgctcctcgtccccttacccagaacatgattcagatcctaacataaacacaaaaacaggtcagggaaccaaaacactgtggtcttgtctattatacaaaatattgagataatgttcacgattcattctgttttcagcaattgtgacaattttgaagcttctctcgaagcttcgaaacacttcatttcctactaaataccaaaacgtgtcagacaggcatcaccagtgggaacttggttttgttttgtttttttttttgagatggagtctcgctctgttacccaggctggagtgcacaatctcggctcaccacaacttctgcctcccaggttcaagcaattcgcctgcctcagcagcctgaggagctgggactacaggcacgcgacaccatgcccggctaatttctgtatttttagtagagatggggtttcactatgttggccaggctggtctcgaactcctgacctcgtgatccgcccatcttggcctcccaaagtgctgggattacaggtgtgagccactgtgcctggccggggaactttgtttttaaacgtttacaaacaaaaagattttcgatgcataggccagtcctaatgcatcccataatggggaccaaggcaaaaacacacacacacaactacaaaatattccctagaaaaatgcaagatcctccgaaaatcaagatctctctaccaaacaacataccaagtcatcacagaagaggtgaagatgcctctcaaaagacatgtgccacagaaatagagcttgaaatactgaacacgatttctcgaagatccttctcaccaccccaagagaagcgccctgctctggtgagggaagaggaggcaaaggagaagagagaagtttcccttccatctggatctgggtggatgccaaccctgacgtgcagggcagagcaccaggctgcaggaactggatgctaattgcaatcgctttttgctttggaacatttgccaggaacttgtgaactgctaaggggatgaccaggaaactggatccatctctgtggctggggatgttttgaatgattctcgcgggctccctgtctgcttggtgaccctgttggtcctatgcgtatctgcgccagggaattaaactagccagtctgacgttctcaagcaccgccctggacacccccactgccagttcatggtctacagccacagtgaccccagcttttcacacaggtcctgaatgttatctggaatgcagacacaagtgctctgagctacactgcttggggaataattccacatggaaaggtacaacgtggccaagatctccgcagggacacggccctcagatgacagactccaggaagaaagagcatgagacactggtctctgtttaggtttgcccagagctcacggccgtctgcactgcaggcaacgcatcctcctgcggctcacggggggccaggaaccccagggcttctgatggagagttatgcaccgtcccctcggctgggttgtacattcactgattgtcagaagtttctgatactgctgtgggggccggggaaggagtcaccaacagtctggtcctgtcctttggactctacacatcatagcggttcaaactgtacgagtttgggtagctctgccggctgtattggaagtggtctgttaagatgttgttgcggccgtactgatagtccccgtgctgggggaagaggaggccgttgtggggcttctccagtgggctccggtgacgctccttgctgctcaggtctgctgtggtgacggggaggaggtgcttcctggcttgctggtttgcatcgtacttggtctgtgccagaaagagagcaatgagacaggacatgcccggggcataagagctcgtaattcaaagtcaatcaactggctggctgcggtggctcacacctgtaatcccagcactttgggaggtcgaggcgggaggatcacctgagctcaggagtttgagaccagcctgggcaacatggcaaaaccccgtctctactaaaaatacaaaaaattaaccgggtgtggtggcgcatgctgtagttccagctactcaggcgttctgaggcacaagaatcacttgaacccaggaggcggaggttgcagtgagctgggaccataccactgcactccagcctgggagacagagcaagacgctgtctcagaaaaaaaaaaaaaaaaaaaaaaagtcagttaacctccggggccggcataagtcatagggcttgagcaaggaaagcagacttgaatggaccagaccacagtgcatggacagactcagaagacaagtccttggccaggcgcagtggcttatgcctgtagttcaagtgctttgggaggcctaggcgggaggatcacttgaggctaggagttggagaccagactggacaaaatagagagaccccatatctacatgtgttaagaaacaaatgaagaggccaggtgtggtggctcatgcctgtaatccctacactttgggaggccaaggcaggtggatcaactgaggtcaggagttggaggctggcctggccaagatggtgaaaccccatctctactaaaaatacaaaaattagccaggtgtggtaggcgcctgtagtcccagctactcgggaggctgaggcaggagaatcgcttgaccccgggaggcggaggttgcagtaagctgggatggagcgccactgcaatccagcctgggtgacagagccagactccatctcgaaaaaaaaaaaaaaaaaaaagaaaaggaaaagaaggcaagccctccctgttggccatcccatgtccttacaccgcactaaacagagcctttgagaggagggagggaaaaccccagctgagacacagccggaatgatttgaggacctgaggttgcctatgcaggaaaaaggaagccagagtgggatggggctacgccaagatcataaaccagtcagtggcaaagctctgacatacaaccccagccttgagcgcccgggaggcccttccttttctgacttcctgggtgttggggggccggcttccttccctgcccagcctctcagactctcaccttgttatagaggaagacccccaggatggcggtcatcatgcccaggacgttggtgctggtgactgggttgcgcagcatgatcagggacaccgtgatgaccatgattcttttggtggcattggcgaccgagtagctcagggggctaacgaggttgaggatgctgaaggcgataacattctgggcaaagttacagaagccgctgacagccaggagcaggagcgtccagggccactggtagacgtaggtctgcagagaccggaaggtaaagacagcacttcagtgggcagcggtgaccctgcctccctgtatccacctggcagggttaggggaagggatgtggaggggctcatctggagcctcatggtccacaggcagccagtccagatgtgtcaccaagagacactaggtgctttaggtccatgacctcagaacctcatgacaccacacagcatgggaatcacccgccgtctcctgccaaggaaacaggtgaagccaggtccccaaagggcaccaagcaagacgtaagccaaagccttccctggcagtgaacagccaggaaccctgggtttggcaaagcagggatctgcttgttggacgcaatgcattctacagggttggaggtcctgggaaggtggctctgagcctgcgaagtacctggtaatacgaaagccacgggtctgcacctattgctgcgaggatgaacagaatcatggcttttgaagtgctttacaacaatctcaagccaaacaaacacaagaggtgacgttaccatcaacagctgaggccaggtgcagtggctcacacctgtaatcccagcactttgggaggccgatgcagctggatcatctgaggtcaggagttcaagaccagcctgaccaacatggtaaaactgtgtctctattaaaaatacaaaattggtcgggtgtggtgtggtgtggtggcgcatgcctgtaatcccagctgaggcaggacaatctcttgaacctgggaggtggaggttgcagtgagctgagattgcaccactgcactccagccagggcaacagagcgagactctgtctcaaaaaaacaaacaaaaaaaccagtttaggttgggcgtggtggctcatgcctgtaatcccagcactctgggaggctaaggaaaaaaaatcattcgagggcagcctgggcaacacagtgagaccctgtctctacaaaaaaaaaaaaaaattagccaggcatggtggtgcacacctgtggtcccagctacctgggaggctgaggtgggaggatcgcttgagcctaggagttcaaggctacagtgagctacgatggcgccatagcaccccagcctgggcgacagtgtaagacactgtttcaaaaaaaccccacaaaactttaccatctgaccctgaccagaatgaggccattctgactaagggatccagaaattaagaaatcacaactagcagacatcgggaccatggaatcccccaaagagcctaggctggtcccaggacaggcagacaggtgagaaccaggtagacactgccctgtaggccaatttccaggccacgctgaccttggccacaggaggacagagctggctcagcccagggtgaccgtgattggcggccctgctggagctgcaggatgtctacctgactccatctccactgcactccaagagagaaggatcacacggtcctctcaaatgcaagaagacacgcttaggcgaccagctcaatgtcaaccaactcaagactggaactcccaaatgcaaatccatttacctgtgccatacaccctgcagcttctgcggggaacctcactggaggaatagcccctgtaatatatatgagcccaccaggatgccttcatgttgggccagcctgttctcccaggggtcgctccctaaggtgatcggttaggatttccatgctattttcttcctgcttgcatagatatctatcttctgggaagggaacccaaccaatctggtttaaaacaaaaaaaaagatacataataaaatggactgatttggcagcacggtgcacaattccaggcatttttttttttttgagacagagttttgctctgtcgcccaggctggagtgcagtggcgcgatctctgctcactgcaagctccgcctcctgggttcacgccattctcctgcctcagcctcccgagtagccgggactacaggcgcccgccaccgcgcccggctaattttttgtatttttagtagagacggggtttcaccgtgttagccaggatggtctcgatctcctgacctcgtgatccacctgcctcggcctcccaaagtgctgggattactggcatgagccaccacgcctggccaattccaggcattttaacaaatgcatcaattcatggaaccaccatgaccatcagggattaggacactcctggggggcttctcttttgtcctaaccccctcctcctaaacctggcaaccatccatgttttctgtcatgatccgtgtgtccttgggagactgtcatggagctggaatcacatggctgggaacctttggagacaggctgctttcactcagtgtggcaactctgccattcatccatgttgtgagggacaagagttggtaccttttcattgctgagtaatgctccactgtgtgtaacattccatgtactgaagttttttgttttgttttgttttgagacggagtcttgctctgtcacctaggctgcagtgcagtggtgggatctctgcttacagtaagctccgcctcctgggttcacgccattctcctgcctcagcctcccgcatagctgggactacaggcgcccgccaccatgcccggctaattgttgtatttttagtagagacagggtttcatcgtgttagccaggatggtgaagttttttttttgtttttgtttttttttgagatagagttttgctcttgtcaccctggctggagtgcaatggtgcgatctcagctcactgcaacctctgcctcccgggttcaagtgattctcctgtttcagcctcccgagtagctgggattacaggcaaccaccaccatgcccagctaatttttgtatttttagtagagatggggtttcaccatgttggccaggctggtctcgaactcctgacctcaggtgatccgcccaccttggcctcccaaagtgctgggactacaggtgtgagccaccacacccggcctattttttcttgagacggagtctcactctgtcacccaggttggagtgcagtggcacgatcttggctcactgcaacctctgcctcccaggttcaagcaattcacctgcctcagcctgccaagtagctgggactacaggtgtgccgcaccacacctggctaatttttctatttttagtagaggaggagtttcactatattgggcaggctggtctcgaactcctgacctcaagtgatccacctggctcggccttccaaagtgctgggattggattatatgcatgaaccactgcacccagccatctgtccattgtcttctgatctaatttctctctgttgtttaaactggataatgtagactgatttatcttcaagttattggctccttcctctgttacctccattccgcttttcagtccatcccttgagttttttttttttttttttgagatggactctcgctctgtcgcccaggctggagtgcaacagcatggtcttggctcactgcaacctccgcctcccacgttcaagcagttctcctgcctcagccttctgagtagctgggattacaggcacgtgccaccacgcccagctaatttttgtatttttagtagagacggggtttctccatgttggtcaggctggtcttgaactcctgaccttgtgatccatctgccttggcctcccaaagttctgggattacaggcatgagccaccacgcccagccaatcccgtgagtttttaagttactatcttccatttaaaaatttctggcctccagcctggccaacatggtgaaaccccatctctactaaaaatataaaaattagccaggcatggtggcaggcgcctgtaatcccagttgctcgggaggctgaggtaggagaatcacttgagcctgggaggcagaggttgcagtgagccgagatcccgccactgcactccagcctgggtgacagagcaagactccgtctaagggaaaaaaaagaaaatttctagccaagtttggtggctcatgtctatagtcccagcactttgggaggctgaggcgggtggatcacttaagcccagaagtttgagaccagactgggcaatatggcaaaaccttctttctacaaaaaatacacacacacacacacacacacacacacacacacacagagttaaccagatatgctggtgtgaacgtgtagtcccagctactcaagaggttgaggtgggaggatcactgagcccagagaggttgaggtggcagtgagctgtgattgtaccactgcactccagcctgagcacagaatgagaccctctctcaaaggaatttaaaaaatttccatttggttcttcactctatcttctatctgttcacatttgtctccagagtctttactttgctccttggagcacgatggtaatcactgctttaaagtctgtctgataatcccaacatctgtatcattgcactgttggcccttgttgattgtcttttcccaaccacctggaatttcctgggtcttcgtaaactacgtaattttggctggaatcccgggcatttcgcatattataaaagtctgggtcttatttaaatcctatgaagaatgttgatgttttgttttagcaggcaattgatgatgctgggttcaggctgcaggcttgaccagccttctgtgggttgtggttccaatgtcagttatgttttcaaagcctttccagtggtatttggctctgtcctgagtctgtgccgcctgtggtcagtctgaaagccaagcggtggtctctcccacagttctgttcttagtctttggtatgctgtttaagatctcatcctcacatgtgtgacgctcaggggcgagcctgggattccatgggcgactttatgaggtcgctgtcctcagctcctccctccacacaatctcctgagtactttctagtttcctagtccctccctttcatggccctccagtcagaaagctgaggtttaatcaccgtactctgctgttcacttcctgtgattacacccccatttgagggtcaagcagtgacagtacagagaacaagctgcaaaagggctcatcccatcctctgaggactatatgtcctcaaacagcagaggaagagtcgcccttctcagggttttaggtggctgtggaacctgctgctgctgccaccaacgtaggattgtcaggagcctgggaagcaagagatgaaggcaaaaaagaaaatagaaaaaaacctaacagacagccgggcgtgccggctggcgcctgtaatcccggcactttgggaggctgaggcagggagatgatctgaggtcaggagttcgagaccagcctggccaacatggtgaaaccccgtctctactaaaaacacaaaaattagccaggagtggtggtgcgcgcctacaattccagctactcaggaagctgaggtgggagaatcacttgaacctgggaggtggaggttagagtaagctaagatcgtgccactgcactccagtctgggtgacagagtgagactccatctcaaaaacaaaaaaaaaaaaccaaaaaaaaaaaaaaaaaaagagaaaaagcctaacaggcatccaggtgtggtggctcacgcctgtaatcctatctctttgggaggtcgaggcaggcagatcacctgaggtcgggagttcaagaccagcctggccaacatggtgaaacccatctctactaaaaaaaaaaaaagaatacataaaaattagctgggcatgatggcatgtgcctgtaatcccagctatatgggaggctggggcaggacaatctcttgaaccctggaggcagaggttgcagcgagctgagatcacgccactgcgctccagcctgggcaacagatcaagactccatctcaaaaaaaaaaaaaaaaaaaaaaaaaaaaaagaaagaaaagaaaagagaaagcctaacaggggatttcctccattctctctgagggttaggagtctcctttcccattctccagactccaagcagagaacatctctgttctcattcagtgcccacatctaccttctgagctgcctcatgtccaggctgaagacacaggaggaagaagaatgacgaactcactggtggctccaaggcactctgaattctggtctttcctccgcccatctgcctgctaccatttatttctcggttctcaagtagctgcttcatgcattctgtccaagttttgaaaccaggccacctgctccagagtctaggaatccccgcctgtcttttgccaagccatttggcaactgggccaggcgtctctgggaactgcccactgcagcctttgattcttggtagactggagagcagcagacaccagctgacattctcccatctcatcctcttcccgcctgttctggagaacaggactgcgacggtgctaactaacctgctgtctgtgtagtctatgtgggagacacaagacaaagagggggaacccagacatgtgggaaccccatcttcagactgcaacattagtgaatatggtgtatgcctagggctgctattaaaatacacaaagtcatgctcatgttaaaaaacatatgggccaagtgtggtggctcacagctgtaatcccagcactttgagaggccaaggcgggaggatggcttaaggccaggagttcaagaccaacctaggcaacagtgggagacagtctctacgaaaaaaaagaaccaaccaaacaaaacaccaccaaacataacatacatagcctcaactaaaaaaaaaaggttacttaaggtattacaacaacaaaaaagataatgactagaacaacaataacaacacaaaatgtcctaagtgcaagaaaagcaaagacaaaaaaacacagcaaaagcctgtatgtttctgtccatgtgtggacacatacatactctaatgagctgtaacacagaacagcagaggaactgacaggaaacccactgacactattacacagccgtacaagaaatgagaaaggccttctatgtcgttatgaagagctctctgggacgatgagatgaaatgaacaaggtgcagaatagttcagctccccttcagtatccacggaggactggttctagggacccctgcggatgccaaaatctacagatattcaagtcccttttataaaatggtttagtatttgcatgtaatccatgcacatcctcccatatacttgaaatcatcgctagattacttgtaatccctaatacaataaaactgctatacaaataattgttatactgtattattttaaaatgtcttattctttattatagtattttgtttttctaccatatattttcaattcgcagttggctgaatccactagtgtggaacccacagatatggaaggatgactgtatgtttatatttatttttgagatagggtcttgctctgtcatgctggctggggtgcagtggctcaaacatggctcactgcagctttgaccttcccgggctcaagtgatcttcccacctcaggctcccaagtagctcggactacaggcatgtgccaccatgccgggttaatttttggttttgttttacgtagagacggggtttcaccatgttgaccaggctggtctcaaactcctgaggctaaagcagtctgcctgcctctgccttccaaaatactgggattacatgtgtgaggcactgtgcctgacctgtaaatttaaaaagctactttttgggctgggcgtggtcgcttacgcctataattccagcactttgggaggccgaagtgggtggatcacctaatgtcaggagtttgagactagcctggccaaaatggagaaaccccacctctagtaaaaacacacaaaaaattagctgggcgcggtggtgggtgtctgtagtcccagctactcgggaggctgaggcaggagaactgcttgaatccgggaggcggaggctgcagtgagccgagaacatgccattgcattctagcctaggagacagaaaaactccgtctcaaaaaataaaataaaataaaataaaataataaaataaaaagctactctgtgtgtaataaggacagagggtgattatacatgcaaatttgcttatatttgcaaaaatatggaacaggtgaactaggagcctaagaaatgttatccatggtcagggaggggacagggagagtacaggaatcatgaccagacttcttctttttttttatttttatgagacagtctcactttgtcacccaggttggagtgcagtgtcgtgatctcagctcactgcaacctccacctacctagtagctaggattataggcgtacgccaccacaccagataatttttatattttttctagagatggggtttccccacgttggccaggctggtttcgaactcctggcctcaagggatccacctacctcggtctcctaaagtgctgggattccaggtgtgagccaccacacccagcctgcaaagaaatactaaccttttctcagcactccagttgcaattgtgctgtgagaatgctcattctgaagcaattatatgagtgagtgtacagtagaataacatcagtgaataacgggtagaataagcaactaagaaacgaggagcggaaccaagcataccagcgacgagatctaaatatgaaattcaaaacagcaaagatctggactgttcaactgaaagtgacgctaattgctaggaactctttgctgctgccccaagtgtgtacttcctaatttttcacagtaaaggcctaacaacaatgaccacccagcagcaaaaagcacccatggcacctggattgtgtctctaaataccgctccccactaacggcacctggagtcctgaaggaggggctgactgcagctctgggatgggaagtacacaaggtgaaggcgggcatcccgctgggagaaacgctgacccacagtgctagaagggcaaggagccaatcagaagggctccaatggctaagacaggacaatttttttttcttctttttttttaagatggagtctcgctctgtcgcccaggctggagtgcagtggtacgatctcagctcaccgcaacctccgccttccaggttcaagcaattctcctgcctcagcctcctgagtagctgggattacaggcgtgcaccaccatgcctggcaaatttttgtattttctgtagagatggggtttcaccacgttggccaggctggtcttgaactcctgacctcaagtgatctgcccacctcggcctcccaaagtgctgggattacaggctggagccactgcgcctggccaagacaggacaatttgactaggaaaacgaataattcatgcaactgacaaacacataaaagttcacaatgatgctggagaaaaaaagagaaccccttccctacccccaaacaaaccctcaactctggtcaacatttggagtaagctccaactctctatcctgaaaattagtcatcaaaaggaacagttaagcattaaactgcctttctcgtaccatacttcaaggtaacaaactagtcctggaagatggaaagttcttcacagaagaattacagctcatcaatgtgaaacgaaagttagaaaagtgagccatggtttactgattgggaaaatagaggtaatatccactacttcagcaggtggagccaaggattaaagataagaaatgtcacaaatccagctagaccacattaagacctcaataaatatttacttttcctttctaactcgagtctggaagaatcgcactggcctcctcctcaccgcaggcacttgcattcatttataacacattctctgaaggcagaccctgcaggtggcaaaaagattcgacgtggagtaaatggaaacagagaccagggaggaactgagctgcacagttttctttctttcttttttttttttgagacggagcttcacacttgttgcccaggctggagtgcagtggtgcgatctcggctcactgcaaactctgcctcctgggttcaagcgattctcccacctcagcctcccaagtggctgggattacaggcgtgcaccaccacgcctggctaattttgtatttttagtagagacaggatttcaccatattggtcaggctggtctcgaactcctgacctcaaatgattcacacaccttggcctcccaaagtgctgggattataggcgtaagccaccacacccaggcagcgcatgtttttttcttttttttttgacacggagtctccctctgtcacccaggctggagtgcagtggcaccatctcggctcactgcaaccgccacatcctgggttcaagcaattcttctgcctcagcctcccaagtagctgggactacaggtgcgagccaccatgcctggctaatttttgtatttttgggagaaacagggtgtcaccatattggccaggctggtctcaaactcctgacctcgtgatccgcccgccttggcctcccagagtgctgggattacaggcgtgagccactgcgcccggctttttttttttttttttttttttttggccagtgcatagttttcaaagttccagggctggcaaggcacagtggctcacatctgtaatcccagcactttgggaggccaaggcagatctcttaacgccaggagttcaggaccagcctgggcaacatagtgagaccctgtctctccaaaaacagtaaaaaaacaaaaatcaaacaaaaaaaaattagccaggcatggtggtattcgcctgcagtcccagttactcgggaggctgtgggaggatcgcttgagccccggattgaggtcaaggctgcagtgagccatgattgtgccactgcactccagccctggcaacagagcgaggttctgtctctaaaaaataaacatttaaaataaaaaatgagtaaaaataaaaagtcaatgtgctatctggactatactgtcaggaggtgaaagagtcaccttctcttccttgacgctactggcgcacacacagcagctatcagcacctgggatcaagcacaccagagaaggaaatacacaggaaacccacttcctcgatggcgtgcatcgtcaccgtgaggcattacagaggactgactgctgaaagcgctggctgtcaggtgcccaaaagataccacaatgttaacatgcagctacagctcctcaacaaagcacctattctggaactagccaagaaaatggcgtgttcttggtgctgtacaactcaccaagtcgctgctgaccaggaaagccgagaggtccaccagaacccaggtggggatcataaagaagacggcgtggcagcccaggatgttgagcagccggagatggtggatccgtgaatctcgcaagacctggaaagggaaagcctctttagagggtgattaaaactatatgtggcaaaaagggctccagtgactcaggccccaaacacagtgactggacattaaccctgacatctgagcttggacaccaaacctgcaagtgcatttgtgaggacatacacagcacaggcctgaaacaagcaccatgctccacgcataaacgactgagaaaagaaaacaaaaataaaacagtaacactcagtgctggtgaggatgaagtgaagtaggcactctgaaattccactggtttgaggctgaattggtataacctttctaaaatacgaccagacaaaccatattaagagtgattaacgtttcataccctctaacctgagaactgtaagcctatcataatgaaataactgagacaggaaaacatcacacacgtgattgtttctacattacaatgaaaagttggaaataagtggtatttccaatagagagactgcattaactgtggtacctgaaaagtgtgtgattatcacaggagttaagagcaatttttttttttgagacggggtctcactctattcctattgcctaggctggtctcgaactcctagcctcaagtgatcctcctgccttggcctcccaaagtgctgggattatagatgtgagccactgcactaggcttcaacaagttttaaaatcttgttttaaattgaagtttttagctaggcctggtggctaatgcctgtaatcccagtgctttatgaggctgaggtgtgaggatcacttgagcttcgaagactgaggctgcagtaagctatgattgtgccactgcactccagcctgggcgacagtgagccttggtctcaataaaagagcttttctttatttttttcttattgagcacattaactttataatagaaaaacttttttttgtttttgagatggagactcactcttgcccaggttggagtgcagtgatgcaaaatctcagctcactgcaagccccgcttcctgggttcaagcaattcttgtgcctcagtgtctggagtagctgggattacagatgcgtgcctggctaatttttatgtttttagtagagatggggttttgccatattggtcaggctggtgttgaactcctggcctcaagtgaaccgcccgccttggcctcccaaagtgctgggattataggcatgagccactgcgcccggccagaaaaacaaactatttaaaaagcaaaatgacaaacagaaaatcagcagaatggcaatcaagatttttctgctctaatagcaaagaaatttctactccgcctgttttcccaatgccaccagtttgctgcccgcacacccctgaaaccccatgcatgtccgctgatggtgaccaaatacctttttggagaaaatgttctgaagcgagaagcacagcgtggcggcgagggcgctgacgagtccccacatgtcaaaagacaactcggtgacggtggccagcaggacaccgctgatgatggggatgagtgacaagtatacctgcaggaagaggtcatcaagaagggctcacaggccagactagagctgggccacatgccacagatgcccagggaagagcccctctcctccctcagcaaagggataccacctaacactttgaaagtggtgtttgctgtgccagtgacgctctggtgggtggctgggggcaggtggttatcagagcgccaggggcagggcttatttgtgggtagccccatccccataccgtcacccccattaagagcctctgctcagggccacagcccggggctggtcctaactccacagatctgttcagctgccactgacgcaccagggtttgaagccctgatcctctataaggctcccccattccctctttttaaaaaatagtttttttgagacaaagtctcgctctgtcgcccaggctggagtgtagtggcacaatcgtggctcactgcaacctctgcttcccgggttcaagcgattctcctgcctcagactccccagtagctgggattacagggatgtgccaccacgcccggccaatttttttgtacttttagtagagacaggatttcgccatgttagccaggctagtcttgaacgcctgatccacgtcatccatccaccttggcctcccaaagtactgggattacaggtgtgagccactgtgcccagcccccattccctcttacttcaggctcttccagtatggttactcctggctggcacactccactgatgccttctcctcccagtgacctcctgcctccacaaggagtgctttctccaacccacctccaccttgggaggctcctgtgctgtgctcccagggccactgcctggacttccccagcagagagctctccactcactctttttttttttttttgagacggagtctcgctctgtcaccaggatggaatgcagtggcatgatctcggctcactgcaacctctgcctcccaggttcaaccgattcttctgcctcagctttctgagtagctgggactacaggtgcctaccaccacgcccaactaatttttgtatttttagtaaagatggggttttgccatgttggccaggatggtctcgatctcttgacctcgtgatctgcccaccttggcctcccaaagtgctgggattacaagcgtgggccaccgtgcccagcctctccacccactctgtctgttacatcatccggtcccgttagtgtaccttagagcaggtccttgttcactgctttatcctggtgcctagcactcagtaggcactcaatagctgctagctgaatgaacgagtagcaaacatagtgacagagagccttctagaaggtctggcatgcagggctaaacaactcccaacttccaggatccaccaggatccattcccgcgtgtccagctcttctgactctcggctcaatcctgtcctacaaagaacactcttcactttgggaggctgaggagggcagatcacttgaagtcaggagtttgagaccagcctggccaacatggtaaaaccctgtctgtattgaaaatacaaaaattagccaggagtgatggaacgcgcctgcaatcccggctactcgggaggctgaggcaagaatcgcttgaacccaggaggcggagcttgcagtaagctgagatcgcaccacggcactccaatctgggcaacagagggagactccgtctcagaaaaacaaacactcttaaggagagataggagaggtggagattttaggagggagtggtcatgccacaaggagggcagaccgagggctgtggacctgaattccagcttcccgaatatcaggctgtggccctcaggcacatgattctcccctctcagtccatctcaggaaaacctgagatcaggaatgatgactactggccttatctgccttgcagggcaggttcctagaagttatgatgtcattataattagtctggctgcctaaccgggccaattcccagtctttcctcactgtgtgaagttccggctccttgcccaagctgggtacaatgtcccgtacaacggggaaacctgatacacacgatgatatccggtgatgcagctacacacctcagggacaactctgacttctcaggagccaagtcacagcctgacatcaccctgggggagcagggctacagagcacacacaggtcttgctgagacaaagacaggcaggaataaaaaaaaatcagccataggtggcccaatttctataagccgatccagggcactacctctctgagttacataaaatacaacatgccagaaaccaaccacttggaaaagaggcacggtgtccagcatcagcatgaaatggattccggctgagacaacaagcgcccaacttccacttaagaatacgggataaagctgtctccggctaaagccatggctattcttgccccaagccaggaaataccctggcttggcatcttgaacagaatttggactgtgcccaaagcatcctccttatgcagccctgagtcctgtgtgccactttcgcttccgttcccagaccatcacaacttctggctgttttaatttctaagactttgctggattttgccaagatcgaactccttggatcgcgtctggcttctgatcccagaggtcccctgacagaaatctcttgtcaagaagtgaaaacctagccaagtgcagtggctgacgcctgtaataccagcactttgggaggctgaggcggacggatcacttgaggtcaggagtttgagaccagcctggcaacatggtgaaaccctgtctctattaaaaatacaaaaaaattagccaggtgtggtagtgcacgtctgtagtcccaactacttgagaggctgaggcaggagaactgcttgaacctgggaggcggaggttgcagtgagctgagattgtgtcactggacttcaggctgggcaagagtaaaactccgtctcaaaaaaaaaaaaaaaaaagtgaacacctaaccgacagcgttctgatccatccatccctagtcccactggaaaggccacacatggggtgtatggccaagatgtgaccaacccatcacctaccagcaaacccaggtagggaatcaaaacggggaggaaaattggatctgaaagggacaacagtgttcctaagaccacacagcagagatcacagagggacacatactccacacaccactgctcacagggtgattctagaacttgagtagtaaaaggccactggagacctctacactgacttccctatttgacgggaagccaggcagcctgcagaccaggatcctgaccacgtcaccagttggcaacagggaggaaccccctggagctcccatctgcccagagtccctgcccggggttaccttggtgctctgcttctccttcataatgatccgggacaggaggaccacccagatgggcatggtggccttgactgcaaagagagggatgggcactcagggggctgcctgaatttcagggcccaacctgttccacctccacggcgggatgggagggcctggcagcccctcacacctcttcgccccttctctttcggtagggcttcctcctgccacggctgttgtggtctgtcctgcttacctctcagctctcttctcagctcctcttctccctgagaaccccgtgcgtgtccctcccctaccaaacccttggcagcccctctgctgacttctcagtccggcgggacgcgccccgggcggcgcactcctatccatgcgcccaaacccgaagcggcgggcccggccgccgcccccgaggccgggcgcggaacctaccggtgtgtgcataggacacgggcaccttccagatgctgacgtgcgctgacacggacgcgaagtacttgccgaaggcgagcggtagcacgtagcgcgggtagaagcgcggcggcagcagcgggccggacgacggatgcggactgggtccggggcccgagacgggcggcgcggggggcacgcgccaggcgcgcagcagcggcgggagcccagcgcacagagccaggatgtggcacagcgacacggtcaccgggaacgggaaggcgctcaggatcaccttgttgaccacgttgccgcccgcgctcagcgcgtaccacagcaggcacagcgccgccacccgcgcgccctcgcgcgccccaccactgctgctcgctgcgcccgggccccccgcgccgtggcccgcgcccaccgcggccgccgccatcctgcccgagcggccgccccttccagcccgtccgacggcccgacgccgggcgggggcggggctgggcgggggggcaggcgccccggtctacgccgtttcccattggtcgctgcctcctcgcgtcatccctccgcgccggccgacgcgccagccaccacgtctcgagtgcaggcccagtccactgtagatgcgcttccggcggagccgaggccggaagcggaagaaggggacacagacctgcgtccaagctgtgccacctgagacgtgggcggtcccagtgaccgggagccggagctcgaacgggacgggcgaacagaagcgcggagggcttcgcagcgtcggcgtctgtgcgtgggccaaacatcagggcctcgaccagggatacaagggcaaccgctaactagattcctgattcctgatggctggcggcggctgacaccaaaggtaaaaggccttttagggaaagaaaccatttgtgaaaagctcttgggctaaactcgctctgcaaactgggggcgcacgctcgtggccaaactctggcagtgggactatcccggagcacccgatccctggaatcatgttctggaaaccaccgcgacgtgcgcagttctcgggcgtggccctggtatcatcccactgaatcctaggaacgcggtgcggtaggtatcactgtccgcatttcacagaccgaagtccagaatggggaagcgacttgtcttaggcttcctggccacactggggaccgtggtcatggtagcgtccttggacacctgtctccaaggctctgcagaagggggaggtgccgggccctgacggctgatgtccaaggaccagccgggatggaccagccccaggaggccccagtggaggaaaacaggacgaggttttcagtaagatgatcttatactaattcaagggctataatttgttctccacatcgtgtgcctccaactttttcggggaaagggtgttaaaattccgttacagtgtttttacttgtcaaattagaagcagcaaccggctgggtgcagtgagtcaagcttggaatcccagcactttgggaggccaaggtgggcggattgcttgagctcaggagttggagatcgtggcatcgataacatggcagaacctcatctttgcaaaaaatacaaaaattagccaggcgtggtggcgcacgcctgtggtacccactactagggagactgaggtgggtggatcggcttgagcccaggtcaaggttccagtgagctatgatggcgccactgcactgcagcctgggtgacagagcgagacccagtctcaaagaaaagtagaaagcagcaacccaacttggctccccaaatgttggaaggtatcttagcttatccttgcattctcaaaggccctaggcccttctggatacatggacacaggcatggtagtccctgcaggcaggggtagtggggagctgcaacctatcccaaaactctagagatgctgataggaggccaagctctgcaccctaatatcctccagctgtaccctctgtggatcagagtaaagtcacatccttgggacaccatgtctcagcagagctgttaaacataggcacagtgaaattaggaaagtataactataggcaccctacagcacagctgagtgtcagatacttccactgacacactgacatgctttgtgttttagttctcacaactctggggtattctcaccccccaaatggggacatgtgcacaggagtgaagagatgagctcagagccacacagctggtgggtggtaggcctgggttcaacctcatcctgccttcaaagccactttgcccatggccttttgttggggaggggagtgtgttctgcaccaagcttttgccaggaatccctgctagctctcaaactggctctggactgactgtagtcttacaggctggaaggaacctttggtttgccctgtgagactgcatgtcttaaggtgtagctgtttcttcatttgtgaaattaagcagatatgggtaagatgacctattccaaagtgaaaaactggaaaaccaaagtcttagcctacagtttcagggacgagggggaactaaaagatgagcactttatagtcaagggagaaaaatttttttggagtcagcaccaaccagctaataaggcagctgggggccagggccatggggtggcctttcagacacacacacacagctctgagcctctgggccataccttgtaagaactaggtattttgttgaggtgggggtagtcactgagacctgtgctatgggagcctcctacagagggctgctctctaggccaggtaaagtctgggtgagacaagaaaacattccttaatgtggccctgaatgaataaaatgtggaggtcctcccaaatgcagcagcaggctaacaggtggactgcaaggctgtgccctgccctgtctccctgcattgcagctgttggggtctgggtgttcctggctaataatccacaatccaggaaagggctgatttggttgtgaaggtccaaatgagaaaagattctcagactggtttgtgcaaatggttttttttttttttttatttccacatttatatcacaaggtgtccacttactggaccaaatagcaaagttgctcccttctgcgtcctgagaacacagaagtctaggtactgtacattcactaaggctccttgtttttgcaaatcgcgtttatgacaaataaccataaggcaaacgaatctaaaggaatggttatgagtgtttccagcgtacagacaggtcttccccctcgccccacagtacagcataaaaccagtagcacccacaataacttttgtgttgttttggggggactctagaaaggtgaagttttctagatgtgtacaggaagggaaaaaagaaaagggaggaagaaaggaaaggtttttttgtctggtggtctgatggaagaggaattgtttaaaataaacatgagaaaacttaaatttttgcagcatttctttaaaaactgggttataactgaaaccagatataaacaggtggctgcccatggagtgtgggtcacactggctggccagctggcccgcctgcccaatgccagtggctcaccacagctgagaagcttctggcacatgacagacaacactggcctgacagtggctgggtagggagcaaacagaggcagtggcatggcccactgtctcaagacactcagggccaaattaaagaacagaaaatgcaagagagatgagatgcgtgcttctgttgctgtgttaaaggtgacctctcccacaggttttctgtgcctgcctgcaactgaggccccagctttcaggtgctggaaagtgtccgcacctctttgggggtgagggactaacgctttttatagctggtttgctatagagttctgaactcactttgccgtccttccttccacgcggtccttcttcgcaattttgttagtaaactggtagcagcatttcacaaaaagagttttgagggaagagcgcagagagaccgcgtgactcccgccccctccctcccgcctgggccggactccccgagttcccagcgcaggaggcagctgggccccggccacctgcccacctgcctgcccgcccacccggcttctgcaagatgggaatgcactttgtggctgacaggccggtcagtccaagcagacataaggcagaatgttcaagcgcccgtcgtcgccgtgcggatcgagcgatatgcactgcgtccagtcataccagttaccctgtgtgtcctgacacccgttcacccccggccactggctggcctggattctgtcgagatcgtcctgtgtgacctcccgggtcagaccagggaggtccgtgggcgggctttgaggcaccagcacatgcagctgcctggccccttgccgggtgctctcctcctgcttcaggtactcagacatgaagtggtgagcccctggggtctgcgcgcccgatgatgagagcaggctgctctgccggctcaggtaggactggatgatctcgttgcgtgacagctccttccagttcgtctgttcgaaggggctctggaggctggccttggcctcctgcttgtccagctctgtcctggactgctgctccatgtgcacagggctgtctgcccgcactggctctttctgggtcagaggtttgatctgtctcgtcatggggtcaaaggtgagcttccgctcttttaaccggacaggcttgacgcccgcctcagccacctgcccgtccaagttaaccgtatagtctcgaggtcggtacctcttcttctttttactgtccgagccccctgaggaggcagcatcactgtccgccttggaggagtctggggaaaagcctgcccgggacaggaggggctcggctggggacagccctgccttgcagcccggccccgccagccgctggtggctctcaggctgctcaagccagcacactgggctttccgcactgggcagcagctcgagccgccgtacggggggtgtggacggctgtgccagtggaagcggtgacggcacctgtgtggcatcgagtgcctggggccgcggtgaggggctgggcacggagcccttgggtgcatacaagctctgctgccgggcaaaggagccctcatgccgtgagttccgaggactgaaagagcagcgagggggtcccttgggatggggaggccccggagtctcgtccaccctgtccagctgctgcagcaccgaagcctttggctgcaagcagggtccagggggcttgcccaggcccggggagctggtgtgcggtcgcacggcgttgacggggatcttgccactgtgcttgtcattctcgtcacgctccaggcggctgccctctgggcctgcatgcccactgccatccagggagctggcgaagctctctggactcccactgatcccgttggtggggaggggggatgagttggggaccagggggtcgtggctagctttggagaccttgggtggcggccctgggtggccgaggtcacgctggtcaccccggcgcttgcggctgcccagcctgtccagccgctgcccgggcagcctctggaggtcattgcggctcttcaggtcatggatgctcctgggtgggccagccgcccccacctccggccggcagttgtgtgcgcccccgttggcagagccggtggcccccgccagcccccgcagcgccgcctcatgctggtgtgccggctcgatgagcttctgccagctccgcagcagcttcttggcccgcttggcgagctcctcgttcttggttttcttgcggacgtcgttgatgagcttcccaagtcgtgtttcctacaaccagagggagatgatgacatactttcgggacaggaacttctccatgagctgagccagaaatggtgggaagtggccctgacagtgaaatgacccggttcccactgagccctaaactgccagcttccctgacacaaaacttctggggatttccggtcctttgtgacaatataaattctcaaacctagttcccagaccttcagggtcccaggtggcttctcagcagtgctgtcacccaggctcctggtgtcagggggctgtggaccatcaaggccactgtaaggacactgccagagaggcttcctgggtgagagggtgctgtggccgaggcgacagcacagagggtccgcttcaagtggagggttggggatggtgcctctcactggagcctcctccaagcacacctctcctgatgtccccacgtgcccacgaagtgtgctgggcatgtaggatgggagtaacaccacttggtctctgcagtgcccgtgggagagcaagatcgcgaggcacgagctgtgagggcacaccgcctctcttggtcctccgaagcaaagacactgatgctcccagaagctgcggaaggacctggttggtaccatcccctgccccccgttctgccctcccaaatgctggggtctgggatactcacctcaagtgcctctttggtaatagggtatttctccaggctggagatgacttccagcaccgccaccatgttccggatctgtggaaataaaaagccatttgtcaggtccctgtccttctccactgggaggctggaacaccctgccccagcctgctccagtctctccccaaccccagagcaagaggagccagcagcactgaagcccccactccatgtcgtctcctacctgctccctgggccaacctggcacccagtgctcatcctcacctgccgtctgacctcctccagtgtgtggtgtgcgggctgccccaagccctccagtgtacatggtacatacccacccacctgctgaaacccaggatgcctgtggaacaagagctgctcctgatacttaagatgacctctactctgccatctgatgggagtgggagaggagacacggaagaattcatcgaataaaatccacaaagcttaaaagatcaatacacaggccaggcgcggtggctgacacctgtaatcccagcactttgggaggctgacgaaggcggatcagaaggtcaggagtttgagaccagcctggccaacacagtgaaaccccatctctattaaaaatacaaaaattagttgggtgtgctggcatgcgcctgtagttccagctacttgggaggctgaggcacgagaaccacttgaacccgggaggcggagggtgtagtgagctgagaccacaccactgcactccagcctgggtgacagagcaagactccgtgtaaaaaataataataataataataatgataaaccagtcaatctgaatccaaagacaccataaagagagcagaaagtcacaaagtgggagaaggcataggccacaggcccccaaggagctgtatctggaacacagaatgcctgtacagcagtacagctgaccaggagcccggcgtagactggccacaagacaggaacaggcacacggcaatgaaatgtcagtgctgatgctcagcctctcagctttatcgataatcaggaaaactcaaactgaacccacaaatggatacatgatacacgtgccccactgacaacactaggtacttcgggggatacagctgactttggggactgctgggctttgtctggcagagtgaagcatgaacacatcccatgaccaagtaatccctcccttttaggatcttgctaggagccacaccttgttctaagcacttcccacacattactgactcccttaattgttacaacaagaattcctaccactcaaccaccacctccagcaactacaggtttctggtgggctggctagcgggtgggagcccaggggccctgaggaaaccacagtgagtagattactcaactcccccccaccccaacatgataaaggagttaagcgggcacatgatacaaattaaaacagcataaaagggcacacaaggaaatgggcatctctgacccagccactgtagcatttccttgcatttttttccaaaaatatcccttgtgtatataggcgtatacatccacacttatcacatatttcaaaaccaaactgacagtggttcttgccttttctgacttaatgtcagcaatgtccagcctcaaacagagcccctcatttggctcaccatcccttccagagtggggaaggcccgacttgaatgctgtgggacacttaggcactttccgtccgccattacaaaataaggctgcaaccgacggcagtgacagacctgactctgagctagtgcacagacagccatggaggagctggggctccacatccatgcagggtggtcacctcacccccagggaggctgctctattccattcccaccaggccacatccttgccaagactgcgtggcaagagtttccgtaacacatgattgtaaacttagcatcttacacagcacacatttatcatcttaggctctagggctcagaaatcaggtctgagtctcactgggctgggatcctctctagaggatccatttcctgctccttcaggtgttagcagagttcagctcttattttgtttttttttttgagatgaagtttcactcttgtcgcccaggctggagtgcaatggcacgatctcggctcactgcaacctccgtctcctgggttcaagcaattctcctgcctcagcctcccgagtagctgagattataggcacccgccaccacgcccagctaatttttgtatttttttttagtagggacagggtttcaccatgttgaaggctggtcttgaactcctgacctcaggtgatctgccctcctcggcctcccaaagtgctgggattacaagcgtgagccactgcacccggcccagagttcagctctttacactacaggaatgaggcccattttcttgctggttgtcatccgaagccattcccagcttctggagggcactgcatccagctcacaccccctccccttatgctcaaagccagctacaggctgagtcctcacccggcatctctctgacccagccaggataggtgccatctctaaggactccctgactaggcagggcctgcccagatgatctcggatcacctccccatctccaggctgttcccttagtcacatctgtcatgtacggtaccatgtgcccaggctccaggactagaatgtggacgtccttgagggctgttaattctgctggcctcatggattctggcttttctactcttctgccccacttccagtgggaggcagccactgccactccctcccttcccgtgttgtctcctctgggtgtaaagttgcagagccacgacagcagtccccgcagaactcccacaaagctgccctgccaatgggcccatttgctctttggcaacaacggccttgccttgcaatgttctccattcagggctccaaatgaccctgaaaaccctgcttcaagctgtgtcatggtgggggtggacgggtgatatgaggggagatacagtcctgtccgcactcctcgtgcaatgggcagggatcagtgcaggggaagactgtgcgatgaggaggccagtcccagacagacagcaaggccaaccactccctgccccaggcactccagcaccgactcagtccctgggcttgccacatggcttcacctccaccctgctgacctcaccctggtatatttggagccctggttccccacatactcctgaagcagcagtccttgcagagcagaacactgcccagacccagctagcctggtggcacaaagtgtccttgtccttgggcagacaccatcctgctgccagacaagagggaggagacagaacacctgggcaaccccagggtctggtactgagctggtgccccagaaatcaccgctgaactaacagccagtcccaagagtctcctggaaactgtgtgggagctggggacaccaggcgaaggtgtgagggccctgtgactgtgtatccttacccttggcccctcccctgccttatgagccacgcttaagcgtgtgcagagaggccttcagcctctaggagccccaagggaaatgctacagccttggcagtcccctttctgtccccaccgtgtgagctgctcacctgaggagtagaggagcccgcctgctctacctgtaaggtgctagaaacccacagtcctacgccgtaaacagatgaactctgccaacacctgaaggggcagaaaatggatcctccagagaggagcgcagctcgctgcttcctggatcccagcccggtgagactggagctgacttctgagccctagagcctgagatgataaatgtgtgttgtgtaagacacagagagagggtgagtgtccagtgcggccactccctggagccagcagaaggcagtcagtgatgtcagcagagctaaggatgggggcaaggtgagactgccctgccctgcgacctctggggcattgatgtcaagcagtctgaacactgtgtggggagcaccacctgggcatccagacacaggcctcccaggcccaggaggcagacactgagcaatgcagcgaggaatccctgcaaagggcctggccccgaccccaggcacactgagccagaaggctccacagagcctctttatagatggccacagtctgtcccaaagaacacttagcacccaattggtgctggtcccataggagcaaaataggagctggcttctgaccctggccctggggaccctgccttaacaaccaactgaccccccacccaggagtggcaggtctcccactctcatggaggtggccctctgtgagtgacagagacaccaggactcgtatgtggctgaggggaggctcccgctctgactccaggcctgctaagtccagcatgaaccctcagggcagggaggcaggccacagggggagggcagcacctaaggtggcctcccagggaggtcaaaaaaggatgtggcagaacgagctgtgtccacctgggctggagaccgacttccatgctggaaagcagaaaagagctggagaaggatgggcagggagctggccagacagcaccaaagccctgcggcaggggagaggccatgggtaaggacaccgggaggaaaaacagacccaaaagacccaaggtggctccttcacaacctgtcttctatcccccttagcgactgcccccacagaccacctgcccttgccctgtttctgggatgcccttggcacctgtccatctatctggggaagtacactagatcctaatctcagcacagacacagtttgactccacatggggagccgctccaggcgatggcctcaaaagatggctttaaggcagctcttcaggcttgccagggccatgtctgtggcccgatggccaattgcagcctcttgctgtcaggaatagcctggcacatctgaggccccctcctcctttggattctcccttgggatttgttcccagtccaaaaaaacctctcaaaacacctgccaagttgctttcccaaaggggcaggaatcccgtcaggaactgtagcctctcacttctccactagggacccctcaatagatgcagatgggtctgaacttccttaaccatcaacgaagacaggcgttgcctcccctttctaccaacactgaccgcccctgcccacttaatttgcttcagtttggcctcttcattgctgcgggaagtgcctgtgaagggcaagggtgttgggtgggggtggggggtgtcgacagcagaacctccatgcagctactaggagaagcaggggtaaatgcagcaaggagcactctggaagcaggtgggacctccctggggtgcctgctccaaaggcaggcagggcaggaagttagcaggtgggaccaggtgtggcacaggtatacatgcaggtccagcccagccgcctggtacatgaatgttgatggaactgactccactgtcacaccgaacactttcaggtcttagaatggaaatccatgaggcatgatcaggtacacatgggccaataggaatgtgaacattaatctcgtccttctggaatctcagaaaaaccaagcagggaggcctggtctcaggtcataggcatcacagctagcatagatactgaggaagaacagtttgcatccaggcagagggtgaactggggccaccagcacaaccctcagcacacaggtgccccacacttcagggatgccccaggaacacacgcatgggggcatggaggggacaacttctcgcccaagaccacaagaggtctggctgtcccagggctcttttgtggtcatccttccacatgagaacttaaaaaggcttccacgggcgcggtggtgtgcacctgtaatcccagctactcgggaggctgaggcaggagaatcgctcaaacctgggaggcggaggttgcaatgagctgagatcacgccactgcactccagcctcggtgacagagcaagactccgtctcaaaaaaaagaaaaagaaaaaaaaaaccgaaacccaaacactgcccccccccgccccgccaaaaaaaaacaaaaaacaaaacaaaaaaaagaaaggcttccggaaaggctggcacctttgtccccagagagccccatagcctgtgctaagccacaattccagccagcctaactggtgacatgtgctgttcagctcacaggaaatgtgaggaaggaggcggggctggacacgcacagagacagcctgagggaggggccagcacccctcagaagcagcctgggtcaggcgcctggagctgcgtgagacacctcattctcccacaccctgggagcagtggggaaccctgtatgcgacttcacagcacaccacgctccgtgtgagctattaaagacccaccacgcatcctcgtctttcagtgacactttcctgaagaaataatacaatctggaatttgctacagaatcatcccctagggtgagtgacaggagggggatgggtgaaacaaagtcacatggctgtaagcagctatctactgaagcaggatggttacctttctctacttttatgcttgaaatttctcacaaataaagatgagaaaatacatctatttcctagcatttgtttgggagagttcactgatctagaaggactggcagccatctaaaggggaagtgagcaaatagctgtttccaactcctcatagtggcttcactgtccaccatctggcccctgagtggggcagcaagggccgagggctgggtaggatgccacctccctccacgtgagcctgtctcaagtctcaggcctcctaactgatttgaactgcacaacaccatctatctggtgagaccccaggagcccctcaccaagctcccctactctggtactgggctgctgcttaacagacctggtgcagaaacagcaggcacccctggggctggagaggggagctctgagtacccatgccagctgtccatcccggtccgactctcaggtgtcctcacgcctctcttctaaaggaaaccacagagagcccgaaccaggggcacacgctaggtcgacagttccttcctgcagggagaggcctgacctgtaccaggaaggagcccaggacagccaccaccacagagaggacaggccctcaagtggcccagaccaggagggaggacttggcaagaaggggtgggggctaggtcactctcttccagaaggggagaaacataacaatgagccagcagtaacccagggaagggacagccgtcactccaggacctgcccagccccagtcagcaccacctccctcccatctgcgatccacatcctatggctctgggcacagctgagccacaggacacagccactcagaactttctttccaggtttccctcaaaggccagccagcagcactcctctgtggccctgtgaaacccagtgacacctctgacccctccggagtccggaagactagactcttctgaaaacccacctacgacagggtgcgtggaatcacctttcaaaccaaactcctgtcggcaaatattttaattgggccacggcatgtgtccgagtttttcttctgtgaagaggatcactgggtctgagtgcaaagctggggcctgttcagtggagtggacccgctactggccaacctcttcctcgctttattacaggggtgtgtaagtaaaaccctcaggccctgagtaattactgctggggatttccagccctggtctgaaacaaggaactgagactgagttttgagtcccagcagccccttggcttgcctctccattttctccacatctgaactgttcccaccccgcctgagatccccagcctcttgggaatgcagctgtggtagcaaaggggaaaccctgtgctgcccaaggtctgaccaaccaatagtcccaagggtgctgagcctgggcaggcccaaccgggcacaactcgcacaggaccatcactggtgggttgcccttgtgccaagttctttcacgtcatcctcacaagcgcactctacagataaggtaactgagggccaggaaggtaatggaggtcccgggtagaccacacagctagaagatggtgaggcctggccttccactagcctgacatggctaccaaacacacagggcccatctggtgctttgagtaggtggggtgaagggtaccaggtgccaccagcctgtggtgatgtcggcactctgtaaagactctcctgacgtgctcctgcagtgaaatgcacaggttacaaacagttccttgaacccacacagggccacctccacggtctccgtgttgtctatgccttgtccccaggatgcctgagaggcaggaccagggtgacccaggcatgcacgggccaccacagcagggcttcagatggcactggagcccactccccaccgggctggccctgggaacagtgcacatggagcacagactgcagttctgcactcccccacctcggtgtccggccagccttcctgaccaccctggacggtgggcggcactgccctggcagcctgtgggcccgcacctgtgccccacagcccacataacctgctccttgggctcaaaacagcccctgctgaggcctcagtggcaaagcacctgtaaaaaccggttcactttaaaaacaacaatggggatgttgtcgggttttttttttttttttaatgcagaatggtctagacagtaatttacaaaaactacttagctcaaaagactgtggaagtgttcatcagcaagcaagctgtccttccaaacccaaacatgccacagatggcacccagaaacagacagtctgccttcaatgtgctaagcattctaatgccgtccgcggctgagtcacctcgcccaccccccaacccccaacacacagtcgtgtctgctgaggacacacgggtgaatcaaacagggctttgctgggagagtgtgtgtctgtgatttggttcccgccacaccaagtcttcctgcttctgacaaactccgcacgtgttcccaggcagctgggagccaaactgcctctggtgcaagtcagtacaagaggcggcacctgcatccccaccccacctccaccccaagaccccagctctgccctccctctcagctctggaaagcgcagccctgaggggtgctgctgtgcttaccctcaggcgggccccaccctgcactctccgctcagcctcatggggctggtgcaggtccaccaggctctgcccagtgaaggcaccttcctctgaggggacctcatgggagcctcaaaccccaggggcaaagcctcaagttcacagcttctcagaggaagaatgacactgggaggaacaatgacgggaaggtgcatgtctcggccacagccaccaagctcaccacttgaaaagcacttcctgctggggccctcctgctactcccaggagcagccggccacctgagtggtctgtcatgtccatgtggccctccctgtcctgcagccacagctcctgtaatgcttgggcaagtatgcaattgcatgctacaactcagcccgggggacgggaaatgccacctgagtacaggcagcacgcggagccctgactgaaccccatgagcaactcagaaagaggaagcccagggcttggggcagaagtaggagctccatcagtaggcatgcctgacttctgcagcgagggaaacttgcagatgaagccaggaggcaggcagcgctgctctccacagccactgcccccacagcgtccttccctcccactttctgtttttagcagctcttcccaaccaaactaccaacctagactctcctgacctctgcttcaggtctgcagaacttacgattcttactgccatttggccctttgtgaaggcacaagagctctcaaagctcatctgtaaattgactcgttgctacgcggatagaactggagcagtgggaagccaagcggagtcctggtgatagcacgctgggtgggggcttctccctctcagcctctctcttctaggagcagctgataagaatgccagctgcagaagactggaaatgacccaacatcctcgggggaaacacacacacagtgctcggcccatatatgttccgccaaagacagagcccaaataagaacgagccagcttttcaggaatcaacagggaacaaccttcaagagactgccaagcacagagatgcacacaacagcgcaccctgtgccgccgcctggaagatcctagctgaggctgggcagacaaggacctgatggttgagccgcgcatagctgtagcaggggaccgcacctggcctccagcactgacgcaagcaagacctatcactgactggagcccagttcctcctctgagagcatgagaaaaccacaagatggtgtctgtagagcatgaatggtgtgctggagaccacgcccccaggggccaggccacgaggacccgcacactgcactttctgctgggctgctctgtggtctgtaagatccattcaggcagggcagtgcccagcacggtgcctggaggcagcctcagaggcccattgagagaggaagccgaaggagagcagccccccgcctgcctgtccaattgggctgctgtaagatcctgagaactagtgaccttctagaattccccgagacaagtcatcaaatgctctctgagcaccgactgcacacaggtgctctaccaaactctgggcccgctggatgctgggagggggcgttaggatccctgtgtactgacccggaggagtagacagagacagccaaggtcaagaacagaagcaacagataaaatgccaccactgaggctctcacccaggctgccaggaaaccccaggggaggactacacttggctcaggtccagggccaccccttcccccacagctcctgggctctgtgtggagctggagggacaggagtgggcacaggggccttctcattgggcattcctgcaacgagggccacggtgcagagaaccaaggacactgtcacccaagaaagagtctggtgactctgtggatcccatggtaaccaccatttaaggatggacactcacgctatgatccagcaattccactccaagcagcacctacagaaatgcactcagagcagctgtatcagaacagccccaactgaaaacagcccacgcagccaccaacagaacaccgaataaataaatcatggtctgtccattcaatgttggatgaacaaactgctgctacacataacctcaaagacaaatctcaaaacaacgttgagtcaaagagccaaacacaaaaaaacacattttttttttgtcctggattaaaaggtcaaaagcaggcaagacttctagatggtgagagcagtcagggtagtggcaggcagagaatgactaggagaggacgttgaagatggcttcaggggaaaggctctgttccttaacctgggtggactggggttctcagatgtgttcataaatgttcattcagctgtaaaacttgggacttgtacacttttctagatgtatattttctagactatatttacaaaggttgttaaaaataacctactgtgtgtgaattccatgatcttagaggccacctcatcctacagaaacagatggtgaagctgtcagggttgtggaggagggggaggtgttggcaaagcagcccctcgttccccacggcccagaccctctgagagccccacagaacaaggtctgaaaacagcttcaacacaagccctggccacctctacaacacacagtgatgcaatgtgcactgcacttcactgctcactgagaaacgtgtctgcactctcctgccctggatgggactgaggaggacaagggcactctgaagcttccccggcaggagtactcaacagatgagtgtccccaggaagaagtgagcactaatgctactggaaagaggcaggcaggcagcacccactgggcatggtgccagcaccctgcagggcactggggtcttgccacaccatggtctcccctgagaccacagatacgccccctccacccccaacaggtattaagccactttcccatccaagaagccagggtgccagctggccacagattcgttactaacctaacctgctaccccatgcagccagcacacacctgcctccctgctccactgtgacacaggacactttaggatgaggcaaatctgcacatctatacagcggaaaaggacagtgaagaaatgcctcttctactcctagtttgctgagaggttttatcaggaatagatgtctgattttgtcacatgcttttcctgcatgtactgggatgattataaggcttttcatttctggccttgtaatatggttgattacacacattttcaaatgttatctgcctcccttgctttaatttcagctccctttctttgctaccttgattgtggtgttggtgttactgatgtacttacaagttaaaatttatcaaattatatacttctgctatgcgcagtttattgtatgtcaattatatctcaataaagctattaatgtcaggcacagcggctcacacctgtaatccaagcactttgggaggtggaggcaggtggatcacctgaggccaggagtttgagaccagcctgggcaacatggcgaaaccctgtctctactaaaaatacaaaaaaattagccaggcgtggtggcaggcacctgtaatcccagctacttgggaggctgacgcatgagaatcacttgaacccgggaggtggaggttgcagtgagctgagattgcaccactgcactccagcctgggccacagagagagactttctcaaaataaaataaaataaataaataaataaataaataaataaataaataaataaataaagctattaaaaaaacacccatggaggcagacagatgcagcaggtcctaggaaaagtaggagggatggcaggcagagagaaggactgcttctttgttagagaggggaaccagatgccacctgggtttgtcctccctggggaaggagggtgggccctttggggaggctccttctctcctcagtagaaggagaatgactgtcacgcctaggatctcagagggactgtaaggactgaaagatacacttgagaatgcacacaatgcactccccatctcagaccagactcctgcaggcatcagtaggcacctgctttttccttctgggacattctgtatgcacccacaaacacttgtgcactgcactgattaggcatcctaattgtagctttggaaaaaagctgtagctgaagctgggtcacagtgtcctatgagctgtgaaataaaatgccaagcagccaccaagccacttcccaaggctgaacttacacacacacccccttgtatgcctacctatagggtttggtcatacttcactggagacccaggtgaaggaaccaacttcctacactcgagaaaaggccagcggctgcagacatctgcaaagtcttgggcaaacgacagtctgctctccccaaaacatggtgcaagcaatgatgctggatccatcctcctgacctgaaagtagccacggtgcgtctgacagagtcttttccctcctaattccgcatggttttctcctatgggaattaagctcctagagtgagaaatctgtctgaaatcctgactttccccgctagagagctgatctagatccttcctattcaagtgtggcctaggggtcaacagcacgggcatcaccagggagctgctttgaaacgcacaatccccatccccatcccccctagacctcctgcatcagaagctgcattccaacaagccctcaaggaggcccagccccacagggatgatgggcagaggcacccaaggctgtgggctctgcttggcaccatgtgcccagctgcagccctgacccctacttctgtggccagccaatcagaggctccctggtaacactcctggcaccacctgcaccctgctttccagagtccctcccaggtgtgactcatccaatccctctgacaactgtaaaccctgagggggtgtgatgtgcccaagttccatctgcaggaggggactgcagagtccataccacgaccccacagagcccaccaggcacagctgtggggccctgtcccgtcccatgccaatctcagagaaagcctctcccgatggtggtgtgacagggtccagacaaaccacaacaggatgaaaggacaggaaatatccaggctggtgggggacgtaccgccaccaaccagcaatggccactgtcagggacaatggcatctggcagaggctggggagctcccagaggatgttagcaaatcacgccacacatgtcccttccaaacaaagttcagcagcagcaggtctcacccgctcgcctaggcatgacatgtggagcctgtcaccagcttcataaccagtgtccccaccttcatccacttggctcccagagctcctggtcaaaacggcacccccttcttctaaacctcaaagccggtgtttctaagataattccacttcagctccaataaggacctgagtagcttctgcgggctggaccgatgaccagttattgcaactggggacattttctaagggcagatgatggctgtcttggttccaatcaactgccttacaaaccactgccctggaatgcaactgttccaaaggcggcatcactcaaccctctgttttaaaaacacaagtcaacgaaaataacaagttgcaccaccacccccaactcacagccaaacctcccacaggactggccgaattctgccctgcttggctggcgccgactctgtaggtgggccaagcaggcaactgatgcccaccaatccagacaccagcacctggtccccaggagggccaccagcccacagcctgcaaggagaaaagaagaaatcctcctacggccctcagtgacatctcatagacccaacaacctgatgccgaggtgcctatccgaagtcactgcatatttcatcggcaccctctggcccaggctgtgcagaggacagggccaaatcaccacctcaccattcactgggtctggaaagcaagccctttccagcaagggagaggcagggaggcatgagggagctcctcccctggtcatctggctcacagagctcttcctcccacctgcccacacatctgctcagactttctttagccctcactgcctgcaacacacccgctttctcacatgtggtccagcctccacctgcaggtctgctcctcaggtgcagggaccttggttttgttcactgttgcctcctaagtgcctagaacagtgcctggcaactagcagggacttgatacatgccaaatgatgggtggatgaagtccctcatccacggttgctggccaccatgttcactccaatatcacaaacatctcaggggtctccctctgtggcaagtcaacacctagagagcaaacacgctttgtcccgttgtcagctgtcacctgcactggccatcccagaggatcatgagaacacagtgactcttggtggtcctcacaaagcttcatcaaagtccaggtcaagggtgccatctctgagtgggtcctggagatgctgctagacagaaggccacctctcctgtccctccaaagctgtggtcaatggtggcactggctctgctgctctctctcaggcaaacatgtttgctcagcaaggctcaacgtgttttgagagagccttcgttttcaatgcagaggtcctggaagttactatgaccacacaaattttctccagtttaccttcttggcaatcctaaagctattccaaattgttatataaggagggagaagggaagccacatgagatttttgcaaagccacgaattaaagcaatgtggaaattaaacctaacaatccactgtggttaactcagtgacaggattatccatatagtggcggcacagtgtggcaaggcagggagagtggaagcttgctggtagaagcctgtgttatctgctggctacagtgagggcacactcaagggccaccagggctcctgaggccacttgccgccgagagccaaatcaaccacttccttcctttcccactaaaggctaggcagcccctggtggctctggggaaagcccagccacacagcagtggccccagtcaagccccaagtggggtggagcggatctcaccggtacttcctgctgtggacctgaaccacgcgcatctcacaagtggggaaggggcagcgaaaccaacctgagaggccatgatttggcctgggctaaatgccagaggacaccctgcagcgagactcgtgctcccttgtcatgacatgtccaaggcaaggtggggtctgagctgggttctaggagaggcactgaagtggcctgcagaggtggcagaccactggacatggagaaggttcatttttcaccacggtgaagatgaagaagggggaaaaaaccagaactttcttcatttgctaacagcacctcttcaatattttaaaccttttttaacttaaaaaaaaaatctggtttcccccaccttcatcttcaccacacaagtgctgacagtcaaccacagccacagaaaatgcaacagtgcaattaagggcaggaacgcatgtttttactacaccctaaggcagcattaaaaagtgctggctctggaccctacctgtcaccacaccaaaacggctctacccagggaacctgtcaccaaagccagggacccatcagcctgcctcggcctcacctctcagagcagttcctcgaatccagggctgctccttcctcctgaactctgctcctgccggtggcccctctacagtctcaacttcctccacttggggctcctcaggccccaaccccagatccttcctccctcactgcggattcacactccaggagcagtggcagcaccccccatgtaggaaagcccacagtccaggagtcacctccagtaggtgcctctgcgttggacccctgtttcaaagccctgagatggttgaccccagccctcctcaaacccaactcgtgacacgtgcgcacctctttccagctctgtgactgtctagacactctgaccacattgggcctaatgctgtgctgaccgagcacaccgagggaagcaagaagggacctggtgacttgattgtgcacgtgctctcaccctgcccctgtggtcttcctctcctctgagagcatctactgagccactgctgttgtcagatgtgcgctgtcttgaaccccagcagcctcaggaggtgagatgaacattgtcattgcacaaatggacacctggaaactcaggaagggatgacatcctgtggtggcttcaggctgagagtgcccagcagacccaagaatggagaccagtgctcaggtctgacctcagaggccaagctctgcacagaacaaagtgtggagccaactcacacccttcactcccccaacagcaatgctttcctgggtgactttcccgtcctagtccagtgccagtaacaattatatcactgcatcacagatactgcattcttttttcatttaacacttcttgttgctacataatcttcaagatcatgtctaacagctaaatgttctattaatgtatcataattcccttaaccttctccgattgctgggcagttcacttctttctaggttctcctgctgcaaccagtactggaatgaacatcttcaaacatgcttccttctctcattttttccttaggaatcaattcccaggtgttaaactttactccaagagagttcaaatactgtcatggcaactggtactgcctcaacttttttctttttgtttttcttgagacagggtctcgccctgttgcccagattggagtgcagtggcaccatcgtggctcactgcagcttcgacctcacttgagctcaagtgatcctcctgcctcagcctccccaagtgctaagattacaggcaagccactgtgcccagccatgcttcaactgtttttggctcttggcttccacagtgcaatgaccccatcacaaaagggagggagaaagcagttaaatctgctgtgccctgccaagggtcccagaaagcaaccccatgctgcgtcagagctgttatcctgccctccttatgtttcccttgactctgcacaggtatggcagtgtgtctccaaacgtgaaggccagtcaggcaagagagaggatctggcacagacattcataaataatttcctaggactggcactgaagccatactgcccacaattgctgaccacagcctcagccatcgagtgcatacgtgggacacctccttgcgtggagagatgcagacaactcggctgcacgctgccacacccagctctaactcagacaggcatgtgtcaatgccattgttgctctacctggagcaggttacattccttcaggaacatgctggcacagggtggggatgttcctgggatgctgggcaggatgcggggttgaagtggaagaggcaagagcagatctagcccctcttccacgccactcccttcgcccttcacaaaggaacggggtgacaggacctggggtaaggtcttccaagactcctccaggtgtcttgggcaaagtgaggccctggacggggttccacagcctagccacttcccatctgctggcttcccagcctgtagcccttgcacggcacactgtgccacagccccaaagttgcaaacaaatggccaagaatgaggtgggccaacttgcagcagttcatattccaacctcacaagaagaccaccactccatcacgaagtcctatatctcacagaccacgcccacatggtcagagggtgacagatgccagaggggaacagtgcccccaggttcatgagaacaccaagcctgagcccgagcatgtctaccagacagggccaagatggtggcagagcctagatccttctctaggaactctgggttcttctgggacacgggtacagtacaaaagctgtagcctgagatgacaacctcagctatcaatcccacgtccctgtgcccagcactgccagctgacaataatctcaattcagaacagcctcaaaagcaagttaagtttcccccacttcacaggcagtgcaggacccattcagggctctcctgctactgttatataccagatcccagtatgacacattctccgacattcccactttcctagtttatttcagcagcacctcttgaggcaagaagtcaacttaccactgttgtttcacaccgcacttcctaaacaggtaacatttaaggttagacaacagaaacaacacaccaagacaatcatgcctgggtgagcatcaggttaagtttgtttgcaaagtttgccatcggaaaatatgaaaggaggcacacaccaacacggtcctgagttcaccctctctctcctggttcccagcagcacacagaggtgcgtccggctctgtgggctgcttggtgcagccttcgtttaccctttgttcttgccacatcagagccagccactttctaaggctggttttttgtttgtttgtttttgagacagggtcttactctgtcacccagtatggagcgcagtggcatgtgatctcagctcaccgcaacctctgcgtcccaggctcaagccatcttcccacctcagcctcacaagcagctgggattacaggtgtgcaccaccttgcccggctaatttttttgtatttttagtagagacagggtttcatcatgttggccaggctggccttgaactcctgacctcagatgattcgctcaacttgccctcccaaagtgctgggattacaggcgcaagccattgtgcccagcctctaaggctgttttcaaattacctccctggccaggtgcagtggctcacgcctgtaatcccagcactttgggaggccaaggcaggtggatcacctgaggtcaggaattcaagagcagcctggccaagatggtgaaaccctgtgtctactaaaaataaaaaaaaattagccgggcgaggtggtgcacatctgtaattccagctactcgggaagctgacgcaggagaatggcttgaatccgggaggcgcaggctgcagtgagctgagatcacgccattgcactccagcctgggcgacagagtaagattccatctcaaaaaaaaaaaaaaaaaaaaaaaattacctccctggagcttccagagcccaggctcaccccacccccagaaggtcggaacacaagactgccccttgactcaggtcccacttgggttctggcgacatgatggtgatgccctggcctgcctcccagatgcaccccatcattctccttaacccagcagcacttgctggtggcatgaactgccccacttggcatccagtactgttccctcccagcaacacagcaaaaaaatccactgcttttgctacagttgagaagtcgcgtcaacaactgctgttcccctgcacaccctctgacaagttccaccaccagcactgacagttccagtcctgccaccccagaggtccacagaccctgggccactgaagacctcacttctgacactggcgcatcaggcctactgtgccggacccatcatctgtaataacctttaggacaaactgtaagggagaaaatgtgctatgatgacatcaaataataatgagttcactggctgctgaaaaccaggagaatgttgctgaaaaatttaatggctacaataaataaaacaaaagtaataaaaaaaacacagtacacatactggggaaacaactgaaatcaagtaccaagtcccaccagtcaaacttcttgagcttccctgcccctccccgcttggggacacatgtcctccactggacagctcctggagggcctcatgtgtcctggcgctggtgcagtaggaagcctgggggaagagactgctgtcaggcagggctccagatgccatcgaatcattttgattgccctttccattttttttctacttcactcttgtcttaaacaattaatacctggacttgggtgatatttcgtgggttatacttttccctagtacccatgaaaataaatgcatagctatcaaaataaaacatgctcacctacaagcccataaagtcctttttcacggcaggaaacatggatcctctaacccataggctttgctttatttatcagcagccccttcaaatcacagataagctgcagactctggccatcctaaacaaatgtcacgcctctcacaaacacagagtaaatgtgatgtgtggtgtctccagacctgcaggtagcagatgtgcaggacccaggaacagctgcagggaagagcccatccaagctcccttaaatactagcttttgtcacccagaatcccatattaaaagggggtgatatttggtgggagaggccagggaagaagccctaaggctctgatgcattccggccctctgactcctgatcaccctcactgttgcgccccctccctccaggagcagcccaggcttaacggattccctcaggaaccccagttccagcccctgccaaaccgctcccctaccctgctggcctggggctggaactggggttcctctgtagcaccctgcagcgcagctgggcaagccacttctctgtgcaccacaggacacacctgtacaggggactgtgccattgagcccacaggtgctctgaggacaggagagaggctatgtgcaaagcatctgccctggggcctgacgtagaggtctcaccaccaaagggcactaaccacttgccacagaagcctcaaaagttagacctagatggatgcaaattctaccctctgccctcttggtgcctgagatggggtgaggacacactctccaagcacccacctgtgagaggggggacaggcagtcaacaggcagccagcccaggcccaggcccaggcccaccaggagcccaggagcacctccctggctgtggtgcaccctccctaggtcccccctcatccccccgggccctcctgccacaggtccctgcagcagccccctcctgctccgcacagccttgcatgggctctacttccacctcctcttggcacagccctggaattgtgccaggctgaggaaaggagagcagataccaccccctctagtgatgcattaacactgatcaatgactgggacccctggccctgaagctggatctggcctcaaaatccacttttacctggagcttcactgatcgttggggtgcaggggggcctgccctctccttttcaggtatgcccagcaatccccctatccaactgcacatctgctaatactgccagaatttgacaaccctgcctctccccacagaccccagaggccctgtgaggaagcctcaacctcactttctaagcccctatcagctccctgggttctcagcctcctgccagtggcctccaagactgccttgaactgcaccacccccactgaccccaagtgtaagatgaggcctctgggattctcctccccaacctgctcctcccaaagagaatcccacaggccctcctgcttgctgtaggagctctgctgaagatggactaggaagagctggttcttcacagcctcagtgaggccgatcaggcactattttatttattaagaaattcttggccgggagcagtggctgacacctgtaatcccaacactttgggaggccaggcgggtggatcacttggggccaggagttcaaggccagcctggcccacatggcaaaaccctgcctctacaaaaaacacaaaaattagccaggtgtggtggcgcacgcctgtagacacagctactggggaggctgaggcacgaaaattgaacccaggaggttgaggcagcagtgagctgagactgtgctactgcactccagcccttttacaagcagctaaggcacagagaggtcagctaatctacctgaggtcacacagctgggtctggggcccaggcagcctggttacaaacactgactttttttttttttttgagacagagtttcactcgtttcccaggctggaatgcaatggcatgaactcggctcaccacaacctctgcttcctggattcaagcgattctcctgcctcagcctcccgagtagctgggattacaggcatgcgccaccacgcccagctaattttgtatttttagtagagacagggtttctccatgttggtcaggctggtctcaaactcccaacctcacgttatctgtccacctcggcctcccaaagtgttgggattacaggtgtgtgccaccgcgcccggcctaagtactggctcttttaccacactctcagctgccactcacagcaacacacagataaagcacgcctgtggccttgaaggtgctcctggcctggcaggcgagcagacatgtgatgagagagcttctaagtgtgtagcaggcagggctgtgacactcaggatgctctggggcccctaggagggtgacagagggagtctgcgaggacacctggagagtaagcaggagtcctctggacaagctggggaggcaaggacccgggagcagcacaagtaaagggctgggcacacagcagcgcagcatgcgcagagtgccagacaaggtggggacacctcccggcaggccaccccgggccatgctcagctcagggagtgacagggtcagactgtcgttttaaatagctcattctgctatgcagaagcaaacacacagctgaagcagggagacagttctgtgggcgctggccagcctcagggagcgacatggtgaggggcaggaagggacgtggctgtgggaagcagcggggctgagagagggaggactcaaggcaggccgggaagcccaccactcggctgtgtgcctgcaggggtgtcaggggatggatggcgggatacctgtagccagacaccagggagccgccgtcagcctgtcctactgacgtgcacctgctggttcattcattccctatggaaagttctgagcacagacttttggcagatcacgctgtacccattctgggacaccagtacatcactgaccatgagggaaaaaatggtgccgactggaacacacagcttctcctcaaagacacagaaatgcgactgaaatgggcatttcattccttctcacagcaaccctgagcacttggaggtaggtccaggtggaaggtcttcctcacaccctgcacacagcctggaaccataagccatccccactaccctctcccctcaactgtcatgaatgggaccctgaatgccacacccctaccacctttctaaacttaactcagaaacaaccgctacaggcaattccacttctgggtatgtacccaaaagaaccgaaagcagggacgtggacagacatttacacacccatgtccacagcagcattatttgccatggctaaaacatggtggatacaactcaagtgttcaggaacagatgaatgaataagccaagtgtgatatatctgaacaacaggacagtatttcagccttaaaaaggaagggaatcctgacacatgcaacaacacagatgaagactgaagacattatgctgagggaaagaagccagtcgcatgaacactgcacaattccactcatactcagtagacaaaatcagagaggtggaaagtcgaacagtacgtgcgcccagggctcgggaaggggagggacgtgagtgttgaatgggaacagagctcggttttgcaagatgaagagtcctggagacagatggtgatcatgaccacacaaccatgtgagtgtgtaagaccactgaactgtacagttaaaaacagctaagatggttaagttttatgggatgtatattttacaattaaaacaaaaacaaaaacaaaaacaccagcgggaccctggcagagcccctgctgcctaagttcctaagaggtcctcctgccaggaccactctccctcaggcatcttttaggtggctcctgggccctctgctcctcctgcacaggccactgaggcaaacgggagtctcatgtgcaaataaatggacagggcagccaaagaagagaggggctgggcttggaactgagaccaggaaaacctcctgaggctgtggagcaagttgtatttccaagataagcatgaacatcgctcccttgtgggactgtgggagggatcagatggccatgtgggagaacttgcaaggcccatagtcaagtgccagccagctggaggtgggtctcgatctgtgcaatgggaagcatggaaaccatcacctctagggccactgttaagccatgagtgctcatgagtgcttgagggctttttttaaaaaaaaaattcttcccttcttttcttcttaacttcccacactatgctgatgtatcaagggcctttctgaatgctaataccacatctgcaggagctatgggaagatcctggggaagggacctcagcccctgagccgcagtctccccatcggtcaatagcagggccccaacactgcctatctcggtatgtgggggccagatgtaaacaggtactctcccccaggctcactctggcaggcctcttggagcccacacacccaacctcggctgttcaagtaaagcagtgggggaccaggggagctagggcattagggaagggtctctggctccgtaaggctccaggcagtggtgagaggaccccgaggttggaatgcacatcctgtgagtacaggctctgggcagagccatggaagaggtacccatggaaaggtgcctctgcctgcaaggggcacccacagaagactcccctccattatctgccactgtgaaaactaccacccagcactttcactgcctggcagacctaagcacaagtagaggctcccctgggtgcacagggagacattcacatgaatatctgcaaaacaccttttcattagcaaaactctggaagccagttccatgatcatgaagcggcttctagcagggaatgctatgctgcagttaaaggagtgagctagacccatgtgtaaccaagcacagaaagctgggacacactgtggagggaggtgagctaggtgtagagtgattgccctgtgtgccagaactgactgaaaagccacatgcacagtatggcccagtgctctgggctgtgcctgcacagcacaggaaaatggactctacactagtgacatgggtcctctccagagggatagaagaactgcatcagggacaggggtcaaaggaggcctttagctgtaactcaaacattttacttttttaaaggaagacgtatttattgcttgtgtactgaaaagtcagtgagaaaaaagggaaaagaaacatattaaggagaacgactaagctcaggaacgcccaggagtgcagggccatgcctggatgtgcaggctgaggctgggtcccaggacgcttcaaagaccatgagccacctagattccattctgcatggggaaggctggttctaaggactgtacacaaggatatcagagacaatgggttgcagaaggccaccttaggccaggtttgctgggtgacacctgttactcactgtcattcttaatagcacctcattcatctgaaaagtgtcctggtcttgataagatgcacagtcaccctagctacagggggcagggaatggctcacagcgattgcgccacccctacccctgggagccggctcatggtgacacaagcccacacaactaggttggggaccacaaaaatatgtgtccgtcccaagcctctgtgagcctcatctgttcatatgggtgctgttaccccattttcccaccacaggtaagaaaatcagtacctacctgcagtactcgacagcacccaccagcagtgccaatgtggtgccggtggcggggtgaactggggattggtggtagcccctcagtggggggagggagaactttttaagttacggaaatattctacacctcaactggagtagttacacaggtatacgaatttgtcaaaaatgcatcaaaatgtagcgtagagctaaataaaaagacaaatgtgaaagcaagacagacataactgtttaatgagggacttccactgccaaatgtacacctgaaataggcacattgtactgtatgtaaattagacctcactaaaggcagtttttaaattgttggaggtagaatcagaaagacagctgagaggaaagtccctaagtatggtttttaatgcctggagtttgagacaccagtgtgggcaggacacactgatgaggccaaagggggtcctcagactgagatgagaactgaaggccatgagtgaccaggtgaatgaacaacgcccatggaaaggggaaatggatagaacacagagacagtggcagcagcacctggggccaccatccacctgaggcaggtaggattggccaggctgccccactcactgcacacacacagtcagagagagcagcaggaaaggggacaggcacagggcgccctgccaggagcagtgtttctgcactgtcccagccaggcggcactagaggaaaggagaggagaggctcgggtgaacagggtgggagacatggcttggtgaaggcataggggaacaaggaggcaggcgggagatgctgggcaaggaggggactgacaggcagactccatggcaccgggaggaagaggcttgagcattcatcctgtaaatggatgacccttggaaatgaacagctgaggctgcatggcaccctgccagtcacaaagtgctttttcaaagttgtcttcctatcgaactcctggttacaaagagccaaagctctacatcactgtgtgcggatattcgtgcatggcaaatctgtcatccagacaggccagttttccccttcttccttcactcaaaactgaggcctggcaagggatagagcatcggatcactaccacaccagacagccagacagagccaagctgtagctctacctcgcccttagcgggtcatctggaatccacacgcctgggcccacggcagcaggtgaggtcaggagacaggccctgtggccagcaggagaggctgcggtgactcttgaatctcaggagactgtatggccccataaatgaggccagcacagtcagcacaaagcagcctgaagacacaatggggccgggtgcagtgactcacgcctgtaatcccagcactttgggaggctgaggtgggcggatcacctgaggtcgggagttcaagaccagcctggccaacatagtgaaacccccatctctactaaaaatacaaaaataagctgggtgtggtggcgcatgcctgtaatcccagctactcaagaggatgaggcagaattgcttgaacccgggaggcagaggttgcagtgagccaagatcatgccaatgcactccagcttgggtgacagagcgagactccgtctcaaaaaaaataaaaataaaataaaaataaaaacaaaaacaaaagacacaatgagggagggtttccattttttggaggggagcgggggataagcaaatgtggcattagccacgatgaaacctagagagatttttgatggctcagtgatgaagtcagcaacagtgactgccaccatctgggaggggagtaggctgagacagggctgctcgtttcccaggggaggggtgcctggcacacaccaagaagcaatgttggtgtctggcatcaggagcacttttgcaggtttggtgggaacccaaacccacctgggatgcacaatgcaactgctgcagacacgagaattcattcagtcaccttttcacagaaggctctccctgtgttggtcagtctggtctcaaacttctgggctcaaatgatcctcttgtctcagactcccaaagtgtcgggattacaagtgtgaaccactgtatctggtctcagctgctatttatctcctggaaaaataagaacgttggccaggcacgatggcatacacctgtaatcccagctaagcaggcaactgaggtgggaggatcgcttgatgccaggagtttaagaccagcctgggcaacatagtgagaccctgtctctaaaaaataaatagataataaaaataaaaatttaaaaattaaaaagttagccgggtgtggtggcatatacctgtagtcccagctactcaggatgctgaagtgggaggatcacttgagcccagaaatccgaggctacaatgatctatggctatgccattgcactcatgcctgggtgacagagactatctccttttgtggggaaaaaaaaaaaaaaaaaaaaggagcatgtccatattgtgtgcctcgtgccttctgaagaggaactcagggagcagacagagggctcacactcatgttggggaaggcaggcaacagacaagaccatagccacactaaaagccatgaagaaaataaacagtgtgattaatgtgagttgaaggcttccctcacaaccactgggccagatgaggtggtcacttcaaccccggagccctgagagaacccggggaggtaatacatctggagcaagaagcagtgcaagcttgtccaacccatggccctcgggccacatgcaacccaacacaaattcgtaaactttcttaaaacattatgagatttttttttaagctcattggctatcatcagtgttagtgtattttatgtgcagcccaagacaatccttcttccaatgtggctcagagaagccaaaagattggacaccccgatctagagcaagttgcatgataccctgcctccccttcagggcagctggctcctcgtgagccaatgaggggtgctagacagggccaatgggaaactacgatcacgagaactgtcccagcagccagctgcaaaggcgcagacaccatctggacaaggaacctgtctgtggcctgaagcccggcaagcaggccaaggggcaccagggccctggtgggcaaggctccaggcccaggccagatctccgtctgcacacgttccaatacatctcctcttctggggccgcgagccttcagcatccaagccaggtaaggggcagggactctacccaggtgtgtgctggagcctgctcacgccagctttactgagagagcaagcccgtggtgacactttcaggaatcaaaggagccattactaacaattacattatataagcttacaataagttgtgataagaacaaaggaggaagttttcagtactgtgtactcaaaactcatcacttcctacttattttaccaaacttagtactatctaggtttctgaggttattcatgactactgtatgggcatggaggacatggtgtgctactgagtctctttcccaacctcacattcagtgatctcatgttagtggcttgaagccagccatggtgagagtatttccaccacagaaatcagtaaacactataaatcagggcttgattttatgggctccaaactagaaatctgcaaactcctgggccattccataacactgtctgtttttgtaaatgaagattttacttttttcattttacatgctgtttattgaggtaaaattcacattgacataaattaaccacatcaagttttactggaacacagtcacgctcattcactcacatactgtctctggctgcttttgtgctacaaagatagcagtacaacagaagctctacggccatatggcctgcaaagatgaaaatatttactatctggccctttacaaaaagttagccaactcctggggtttagacttaagaaagtgatggagaaaatgttaataatgcaattaaacttaaaaagcgtgtcatgcctgaagtcattacattgggaacaggacaattgagaaaatattcttatagtacaggtatttgaaaactattatctaattcagcaaagacatcacttgactcattaatacaaagatatcgaccaggctggtgcagcggctcacacatgtgatcccagcactttgggaggctgaggcaggtgggtcacttgaggccaggagttcaagaccagcctggccaaaatgcagaaaccctgtctctactaaaaatacaaaaattagccgggtatggtggtgcacacctatagtcgcagctgcttagggggcagcatgagaatcacttgaatccgggaggtggaggttgcagcgagcggagattgcaccaccggactccagtctgggtgacagagcgagactccgtctcaaaaaaaaaaaaaaaaaaaaaaaaaagagagagaataagatattaaccaaagtcatgtcaaaaccaatcagaagctgatacaaaagctcagcaaaaatcaacggaagcagctggtgagaagcaattggctatatggaactgacaacagtgttgtatatttcattattatttgcaaattatatgccacccatcctttatactagtaaaactcataaacttacatgcatatttacatatgtatatgtatggatttcttttctttttcctgagagctggttgtcaaattttcaccagcacaccactgtctataccttagtatatgccttatgtaaattagagcttcattattttgaagtgcttgaaatagagtctgaatgaaactaaagtccatttgcattattgtatttcaacattacatataaatgaaaagattaaagaatctggattttttagaaatgccaactcataaatttttcaatgtttactaaaaaaaatgcttccaagttttatcaccttcttgtgcaaacaaaatttctccacaacaattatcaaagtcaagcaaaacagaaacaaaaacaaaacccacaccctaacatataaaagttatgttcttggacacaagcactctttaaaaaaaaaaaaaaaaaaaaaaaaaggcaatgttatttcagtaatgttattcaagccgggtgtggtcgctcacacatgtaaccccaaccctttgggatgccaaggcggccaggagttcaagaccagcctgggcaacacagcgagaccgtctctataaaaaatacaaaaattagtgaggtgtggtggctagcacttgtagttccagctacttgggaggctgaggcaggaggatcccttgagcccagtagctcaaggctgtagtgagctatgattgcgctattgcactccagcctggacaagtaaagtttttagagcaagactctgtctctaaaaaataataataataagcaaaaccttgcctctaaaaataataataatcataatgttattcaacacaagttcagtattaactatgctccctaacaccctgtattttattttccttataatttcttttttttttttttcaagactgagttttgctcttgttgcccaggctggagtgcaatggtgtgatctcggctcaccacaacctccgcctcccaggttcaagcaattctcctgcctcagcctcctggtagctgggattacaagcattagccaccacgcccagctcattttgtatttttagtagagatggggtttccccatgttggtcaggctggtctcaaactcccgaactcaggtgatccgcccgcctcagcctcccaaagtgctgggattacaggttacaggcgtgagccaccatccttataatttctatggtagaaacagcacatgcactttcccctagtctcgcctccaaattacccattgcaccctgtggatgccactgtttcctatgtgtgccatgacatggaaggctgaaagcagtgtgacagcaggagggcatgggctctgtataatgggtggccaggagaggcctgaagaagtccgactgtcacaagaactggatgagggagaaggttctcccacaagaatgagggcaagggttcaagttaagctgagaaaggaaagaagggcccaaggcctgtagcatgtgtagatcatgacaataaggaatgtgggcgtctattctaagggtgatggaaaaccactgaaggatgtgaagtgacagtggtgtcatctgcttatcggtatggaagggacaggaccaagagggaaatggccagggttggactcgagatggagggcagaggagggctggagaacatgcatcctggcagtagcccccgggcctcacaggtggagtaggtgactaaggtgagaggaaggcagaggcatggaccactccagggtgtttagcagagccatggggtgtggcttcactgactgtgtggagaaaaccaggtgttgtccagtcatttttggtgggatggacctctgggaacatgaagaacatgactggtggccttgactggagtgttatgttgcacactagtgttctgaaccttccggaaacgtatgagaggggaactaatcctctccactgattgcagtacatagaggcccgcaatccactccacagccgattgctctctatagtgctcaagtgctcttcaggctagagcagcctacttttattttcatttttttacagtttaattgaaaagacaatggagcataggggaaaacaaaccaacccattccccctgccccaaccaacacaagtgcttccattttaccccaagttctagttctttaggcatccagcctatccagatgcctgagtcacaaaaccactcctttccccctcatggtaaggcctgcccatttttctatagagccttcagaatcacgctttcggctataggctatttgactctgtggatgcaccatgattctgaagcttctcccatgctgtttaaaaataaacttcattaaaaaaaaaagaagtaaatggagacaaggtcttgttatgttggtcagtctggtcttgaactccttgcctcaagcgatcctgccaccttggcctcccaaagtgttgggattacaggcgtgagccaccaagctcagcctgtaaataaacttccaagagtaaaattactgggtcacaggacatgagcatgtctatgcctcttgctacataaatagtttccaagagggtgacagtggctctgagctcctgccaacagggtgatgcaggttgttgggggtggggtaggagataggccgggagagataaaacagcaacccgctggcttaacatccagtcttgattacccaccaaggccattctgcccacatgtttttgtgcaaggtatatgttccaggtatcaattacgtcaacatttttctgtccagtaaaatcttggagatcttatgattatgattactttttgtgtgtttggtttttttcttgagacagggtctcgctctatcacccaagctggagtgcagtagcgtgatcttggctcaccctagcctcagcctacacagctcaagcgatcctcccacctcagcctcccgagtagctgggactacaggcacatgccaccagccccacctaatgtttgtgatttctactacagacaaggtgtcactatgttgccaaggttggtctcaaactccttgcctcaagcgatcctcccacctcggtctcccaaagtgctgggattacaggctggagccaccatgcctagccacaattgttgattctaaagtatgtctctacacaggaagaatattggctattgcttctgaaaggcagcttcatgtgcacaaagttgtattttgatcatccccacctgcaactgcagcacagagagatttggaaaagtacaggcagcttttaaacctgcttgtgaatttcagcctaagcacctcttccaaggaagaggctctggaccctgacgtctgggattttgttctacaaccaatttcttcctgttttcccccgagggagcatttagaaatgtgtaaattatgcaatgttgtcttgtaactgctccttgctgacactaaaggaaagactacccttgaaaaagaacagcatttgtgaaaatcaaagttcagtatctacaaactcatctaggggtgtaataccccctagctcctgaaaagtcgagaaggggcttatacatgtttagtacctactaggtactaaatttcctttcaggcactgtttacctttagtaggatagggacgtcctcactttatagagagtattaatagcactgataaatatttgatgtgatttgtccaaggacatataacttggagacggagctgtagagattcgaatccaggtctaattcccaaactcttacatattaaatacttttctttctttccatctttctttctttgggaggaggggagaggaggcttagaggatttctagttgattgttaaacctattcatcaacctactcataagaaatgaaaagcctcccttctccacaagaaaagacctcatcaactggagctgacatggctcaaaggctctagagatgtcagaggccgtgtctggctggggaagggacacgggatcctctgcactccacagcagctcaggcacaaactcccccacttccgaggtggaaaaagacagcagagtccccagctctctacccaaggcgcttgacgggcactgtctaggtggcactggcttcacatgcatcccccttccctctacagtgggcagcagtgttatctccggatgaaagcaaaggctctgagggcagaaggagtcgggctcacagctgtgcagtgccagcgacctaacctcactatgcttcagtttcctgaatcagcccatctataaaatgggataattcttagcacagagtgagcacacagtaagagttgatgctgctgtccttgcaaccatttctgttatggccccaggataaagtccttatagtcccttatagatttacaccaaaggatgtcgagcccttggtttgtgaagtgggactggtaactagattcaatgagatccatgccctgggcttggtgacagaatcaatgatggagttaaaatcctcacttccccccttccaaccgcatggcctcaggaagacaacatcccaaactcatctgtcacaggaagacagtaccagcatcttcatgatcagggtgactaaatggaggctaggcattgtgccaggctctcaacatacctcaagccccacaggatggtatcaccaggtgatggcaacaccagctccatgtcacaagtaaaaagactgaggctcggagacattaagtgatctgctccaaggtcaccaaagtagaagcagctgagaaggacctgaagccttccagctaaggtccagaagctgtgctaagggtagtgtctggcccggcgcacggtctcacacctgtaattccagcactctgggaggccgaagcaggcagatcgcttgagctcaggaatttgagaccagcctgggcaacatggtgaaaccccaactctacaaaaattacaaaaaattagctgggtgtggtagcgtgtgtctgtagtcttagctactcagaaggctgaggtaggaggatcacttgagccggggacgtagaggttgcagtgagccgattgtgccactgcactccagcctgggtgacagagtaagaccccatttcaaaataaaataaaataaaataaaaaggtggggggtgggtggggagtgtctgcccaggcctggagggaggaggcacgtgcaggctcatgtgggcctgaggggttcaccaggccactgggtcctgtcgacggcttctggaatccccaaacctaacggaactgagcgatacacacaggacaggctcagcgcctgggtgcagaccatgccagtatggctccaacagacccctcgaaccatgggaggaatccaaagggctgaaggttggagagagccaagtaaccatcacaggaagggggcttcctccaggggtctggccaaatccagccgcagccacctcaaccccaatactaatcagctaaatgactaagccccactaagcctgaattcttacccccaagcccaactgggtcctcccaggttaggcaatgctacttctgtaatctgaagtcagaaatggacccacatccatttgtaaactggtcactggccctaacagaatgaatggctctctaaataccagcaagaaaacaaccaaccagtctttgcttcaaggggaatgggggtgggggaaatgacaggcaagtcagaccggttacaggaagcactgcgggaaagatcagaccaggatgcctgcaatagtcagaagacagggatgcttatggaggctctggaccctgagaccagagaggcaaggagggagagagggcaggtgatcaggtggggtgcacaaaaaggtcaggagctgactgatgagcagctgagcatggctggagcaggagaggaataagaagggctacctgacccagagcctggggcacaatgtgctcagatgattctttactgactctctcagttgcaagtgagggaaaagtcagctcaaatgggttttatcaagaaaggaaaccacaggctcacttagcttaaaaatttggggcagccaggcgtggggactcacgcctgtcattcatcccagcactttgggaggccaaggtgggtggatcacctgaggtcaggagttcgagaccagcctggccaacatgacaaaaccctgtttctactaaaaatacaaaattagctgggtgtggtggcaggcgcctgtaatcccagcaacttgggaggctgaggcaggagaactgcttgaaaccaggaggcagaggttgcaatgaactgagattgcaccattgcactccagcctgggaggcagagcaagactccatctctgggggagaaaaaaaaaaaaaaagtttaggacaggcttcacctcagaccagccaagccacaaggtcttagtcctctccactcctctgaccaggtcttaatcctggacaggctgcctccaggcagcaaaccccagcagaaaacagctcacatcctcttccattcaagtctccccaacctactccagcaaagtgctacaactttcacaggctctgattgggtcacaggtctgtctctgaaccaatcactgcccaggaagatgcagccccattactggccagtcctacctacattactaaccatccaatgggcatggactggagagaggaaggggcagctctcaggaaaacgaggatgcagagaccaggaggaaggccatgggagctagatgggctctctaccaccaagcctgtgtattattaggtagcatgcatgtgagcacccaggatgcttcaggcacagggccatgttccattcttaaaagccttcctatgcagcattttttacatctttctggaaaaacaaaggctgcaaacctaaccttgtcgaaggttgcaaggtgaatggcagagtcaatggttccaactccattctgcttaagtcctccacccaggagaaagactgtcttctccactatatgccacctaaagagctgagactctatccagccagcaacacgacaccaccagaaaagtcaaacatccctatctgttttcagacacacagaggcaggagactgactaggacactgctgcactagaccccctggaggtccagcttgcaggaagaaggactccaggatggccctaaggtggtctacagagcagtagatcatggcaccaccaacagacacagcacagcatgacaaaggcagagatgaagaaggtgtatccactttggagtgggctgtctagacatccaggcacaggagagagcaagtgtccaggtgccaacgaagctgtggctctgagactacctggggaaagtcttaagggccgaagaccgtgagcagtgctacacaaagccaaaacgcttagggggagcaggcaccactggaaagggttgtgtagagaaaaaagagaccaatgcagcaaggggcaagggaaccaggtaggcagacacccccccactgctaggccttgtcattcattccaagtgcccatggtgagcacagagaacagcgccctaaagagaagacaacctggcgtgacaaacacaacaggcatccttgtgcccaaggacagctcatcttcctaaacagatgatgccacttcctacttcccaacttgagggagcccaccacccgaccagataggaaaccgtgttcacagtgctctcaacacagaagaatcatcaccagggtgatgaggaggtgcccactcggtcacacccctaactccttgttgggctgacagcgtgtccagagaggcaatgcacaagtcttccacataccatccagcacaaataccacctgccaactacaccagaacacctaacgtgccccctccccattccaggccagggttttcaccattttccttcaggtacacagggctgcagcagcctgggggcacatgctgtttctgtctgcacaaaaggtcctgctccttcggaaacacctccctgacttactgtgggcactgccactttcttacaagaccctcccatggcaccccaaaccaagccagagtgtgtctcctgaagtttccggaactggaaactagaaagtaactcctgtctacaacaggtcaaactcaggagctgctgcctttcccaacacatgaagcagcccatccacaagacaggcggacacacagacacacacacatagtgtggaggaccagaaacagaaaagattccctctcccttctctccaccccaatttcaatcccaaacagcacttatttaagctcagctcagtgtttagaggaaggaaaaagctggggagcaaatgcggaggagctcacaggagagcagtgctgaagctttcctgggagaagacaggctcctcattcagaggcccacaagttcaggcacttgcttgcccaccaaccatcaaggtgagaaaatgaaatgcttgagaagctcccttaaggcagaagtgaaggtggaatacccattcacaaaactttccctcacagacgagctgagacttaacatgtggcccgtttccgtcacggccaggcaaaagggggagcagacaccaacatcaggtgcttactgagagcccccccagaaacacaaggtggggttggggaaatggaggctgcaaaagaaagatcacttgactctacccctctccattaaccgaaggggaagaagccaggccaggaaacacaggtacgagtttccggttacccagaggggaggcacagatgagaggaaacaggcaggacaatcagacccaacagatctcccagcctctgcccagggtccacaaattcagagaagctacaggaggggccacagctcttgcctgggtcacagcgcagtctcctcatgaccacaggaggcctggtggggttcaggccacctggaccgcaccacctcccccagcaatgagctccattccaggcagtgactgaagcaccaggagagactgtcaagacagggaggaaaaaacagcaccattcaagactgtctccagcccaggacaggatctgaagctgcagctggccagcacctgcactcggacagcgtgacagcgaggtccccaagggtgactacaggcaaatggagtctgtggtttaaccagaacaagaaggtactcacaactccacgcggtgacctcacaccagccaaaccaccctgttgctactctggaccttacatttcccatttttttccccaaaaactcccattttgccttctggagccaaggcccaactatttggcggtcacatcaggagaggtgatgacatcagtgcacatccatggacactggatccactattcttctcccgttaacaggaccttgatgtctcctgggaacatcccctctattgtgggactgtttgggtggaacccacagcagattcaggggtaagccaatcaactaattcaatcaaactgctaatccaatcaaagctcagagaaggcataaggaaacgtttggtggggcttccagcaaagagtcgggagttcggtgagggaaaatcctgaaactgctgggatggagaggaagacaccctactgtgtgaaggcaacactgcaaaagagggagacagaaaaaccaggtcctcacctgaccgcagacttgcctttgggcctgcatgaccatcagcccctttgtgtctaagctcctgccaccagcacagtgctaacctccctttagggctggacaggccacagaattagtataggaagtaaagacaagtgctgtgcaggcaaccaattaacacggaaggaaacaatgtgaaccaatgaccacccaaaaggataaaactgttcttattttatatcccttcacatcagtatcacgggtctcccactgacagcactgaaaagccagcttgctgactgcttgcctaggcaccatgcaagatgcacctgggaggtgaatggagttgggcagcatctataaagggttctggagggctggcctgcagaacaggagagccgttagctaccatggtaactactacatcaccctggggggaacgaggatgtggccacctctccatgcctaactcaagctgggccaggaacctgatgactagaacgggggacatcaaaacaagtcatcaaggggataagaacttaaacccagtgtgtgcagggggctgcccagagagccaatgtgaccaggagtgtgggtgggaaacagaagagtgcactaccgtgctgaaggcacaagcaggcagtggggctgccagggcctgggagtgctgccagcccactgggctctcggtgtgggccatgggtcacacccacctgagtcctcccagtaactcacccactgctgatgcctgcaccacagaacccccaccagagtcaaggccagccacagccaacgccctataaaaccatgctgtgcacccagcacacgaatacccgagtctccacagcagccacgaggctgacccaccaccagggtgtggcctggacaaagcagcaccctactttctcaccatagcaaatgaaaatctggggggatgtgtgtccaggaatgccatgttttgtcacatgaccaaaaaaggccgaaggatcgctggggacccaggcttcacagatgaagtgacatttgaacagtgtctagggaccatggacaggcagaaatctaagatcaagcgccgccttctctattagggtgaaaaatacctgacgagaaagagaggaaaacacacctcacaccccttcttcagccagttccagagaaagcacagagcattttagtgaccactgtcctcccagtctggcataagagcagtgcacagatgaatccagcataaacagctggacccaggcaagaaaggggagtgcctgcgcagcaagtgcccactggcctctcacatgacaagggaggcagccagcaggtggctgtgttccaaccccagcctcatcccatctagcctccttccagctgtgtccgctgagcctcagtttcctcactagtacctgcctcctgtttaatctacacctgctatgaagattaaatgtgttttgaatgcaggtgaagtgctgaaaaccgctggcacctaggacctgctcagtaacgctgacagccattcccaaaactggccctgtttacagtgagagcaccaagcatttgggcacccacgtgctgtggcagttctagacactaagggagcaacacctgctctcctacttgggcacttcacaatcacatggaaaatgtaaccaacaagacctgttatcagcaggaatataaggtgttaaaatgatgaatggttcctgagggagacggtcttggattaagccaggtaaggtttcagaaaagggaggcagtagggatgacaggaggctcccaactggaggcagcacaaaggtcaaattccaggtgtcacacacatacaggtaaggcctgctctcagagttacactgatgctgttttgatgacaagacagaacttcatttcgaagcatgactggattaggagtaggttctgtcctcgaattttctttaaaacagttactcaaagcacacctgttgttatgtgaagcttccagaaggtttctgatgataaaaatgaaccctcatactcaaaaaggtttggagccactaggctagaggaatttaaagggggaaaagttgtaggaactgggaaggaatggaattcaaaatgtaacatgtgaaaacacttcatgtttgcaagggtacaccttggaagacgcaatggagttcagcttccatgctgggcaccaccgatgtgggaagcggaagactgtcgtagttaagccctctgacatcagaaccacccagtgatggattcagacccaaggcttctggttcccttgtctgcaataccagacaaatcggtgaatctctcctagcccctaaaatgaagatgaagcacctaccctagaagtaattcaaagaagcaatgagacactccacacagtagtgtctggcactgtgtaagtgctcagtaaacagcggctgttcgtcttgcagcctctgctgcccaacagagactgctgctggcacacaggagaccgagcctaactctgcatgcaggggaaacctgatgagccccctgacgttttccaagattcattttcctgcagtggatgaacccaggaaactttgctgcagtcacagtaacatccaaaggcctttaaccccaattgcctggcaatccttgggatgtgagttcccagagggctgctggtacttcacctgacatgacccctctccttttgaataggctccacagagaatcgcagaacctcccggtacttggatggtcacagaatccaaaggcctatacacagaatccaagggcctgggtatgtccacatagccatctcacagtgcccccagactgtgttaagtcagctctgacaataatccaccacttccctaagcacatcacagaactctcaccttccccaccctaggcttgcctccaaaagccacacagagcaaatctaatccagagggtacaacaacaccccaaatactgaaaaccagtgccatgtaatgctaccccaaggcccttcccattttctcaagcccagacaccccaaccatacccacagacacagctcgacatctgcctgtgccccatcccacagcagagagggaaaactgtgcaataatttgccgactgttccttccagctctgttcccctcatgccagagacaacgcaagaagagcctgcctgcctgactacagaacttattctgaaaacctggatgatagaatatacttaagaaagccatctcatattcttaagaattctcaactgttttcaaataaggcacggggagaactgttccatttggacttgagacctgcggcaccatcaggccatccctgactgccgagcccacatgccacggcaccccacccaagctcgttcatgaccatgctctatctgccctcctccctatgaggcgccaagccccttgggcacaggggctgagcatcttcaggtctgtaccctctacacccagcacacgagcacttgctaatcagttagtgactgaaatgtaactgcagtgcctcccaaggcatggaatgtattcagagaaggcctttaaatacagcatgtagaattatcggtatgtctttcttactcaggaaatgcttcccggttcagggaatcccgatggcaaatccacaccctgctctaagagtgaaaagcggctgttttggaaggtgctccaagcatgggtgctagcgagaccacactggaatgaaatgtgctgcctctcctttactcactgtgccacaaacttggccacccattctgacaaccagctcctggtccccaaaggaaccaggcagacgtgggacagcctaccactaggaatacaaaggaaaagcacaacgtgcagtaacaaagcacccagtttccagaaggagatgatagtggggaagtggccaggggacccctcccgctggactggagtcacctggagtcagcctggttaaactagagctccatctgagaagatgctcgcagaccccaaaaccaagaaaaggaaagccaagtgtcctccttcacctaagagaccttggcgcccttaagctacatgtcctatcttacacagctgcccaggggctgacgtgaccatggtgcctttttacatctgtatccagaacaaagcccctgaccacatgctggtcttggacagtcctccagggctctgggacctccaaccaggacaacatattctgaggaccacccagaaacctcagtgaggagagactgtaaagtccactttctcctgagggacagaatgagtcaaagacaaggacatacacctgtgtcacaggtgatacttgctacctttccatttcccgaagtcagagaacaccacgctgctcctctcctgtgtcctggccacaatatacagagtaaagacaggagagtccctgaatctgggcaattgtggatcaggtggcatttacatgtttgggtttagggtcctctactattttggatagggtcagaatcaagagtccttcattttgcaatttacaccattctgcttttctgcagaataaatggcattttaagttaatatcaaaagtgctgtaatgttgaagtagagagcaaactggtcacacagattcatgaaaagttccacatcggttgctagttgccacaccgtggtctggcccaggtttctgtctgtgacagagaccttaagatgttcacgggacaggctatgtcatatcaccaccctgttagatgtaacataggtaaatccagccccaatctgtaatctcacatacacttgtaggggacgttacaggatcctcacacgttttcttaccagctcaaaaatgctgccccctcgtgcctcttccggagccatctctccaactttcaaggcagcgtggtggtgttcagagttgaaaggactctaaggactgtcacttaatgactctgggtaagtccctaactttggttccaccacctcccattaagtcagtaagaaacaaaagcattttatcctctgcttgcccctggagacacccactgagcagcacctattacctgatgctgctggcttctgcacctgcaaaaggggagactggctcccccactcacaaggctgttggggagaagcagaactctctgacagggtgccacacaaactaacaaagcatacaccttggtttagaattttgttagttgagaaacttcacacaatgtaccttgcaaagatatattaaaaaaaaaaaaccccttctagaacaattgacattagtctctgctgtcccttctaggatctgaacttagatctggaaggagctttatggggtgcatacaccagttcccaatcccaccctgtggacaagaaatctgcaggcaaaccaaggtaagcaacatccaaccttccaattcttaggtgggaaaatgatctttcttgctgtgtctctctgcagagtgcctcggtcacctctcccttggtctctgttgcctgaagagctgtgaaaaagaaagcagctcccaaggacgtttcccgctcagagcctggcagctggaggcactgacacacgcggccagggctagttcaagtccctctttgctgcgggaccttctcaggcctctccctggtctgaacacagggcattcacctgcagctagcaagccctgccctgtgcggttattttacttgccatgaggatgcagtacaccgtctactattcgtcggacctttcctctaaaagctaagtttgttaatcatcacttaacatctgtgttcctcacagttctactgagtagcatctcaagccacctgtgattcttccactctccaaagttctgcattagaatattccacgactgaactcttgggcataaagtggtcacaaaggcttcttggtaaaatggggctcaaatgtagctcctcaggcacaggtccaagatggatgctagggttcagtcagtttaagcagcaggtagaaagtgtgcctaatgcttctgctctagagggagaagacaagacaggaaacatccccaagaagcttgcgtgctgcacaggaagataaagctcatacctccacagaacgagtgtcccaggcagatgggaaccgaatcacctgctgaggagactgctcactatgactgctgtgcgagagtaagacacagtccttcactttacccacaatgcagtgagagtaagctggaacaatcatgcacacactgcgcttcggagagattttcaacaccctgggctgaaagggtgcacgacgaaaagaaaagctccaactgctctgaaaaactgttagtagccttttcaaaaggagagtagaggatttactttattactgaattggcagaaattattaactctgagcctgctgctataggaattcaaatgcatactccaggggctaaaagtgagagcacagaaactactttcctcctaagaattcctttgtcaaggagatggttggtaaacacgacttcgtcacttccctaactttccagatacttgtggatattaggtcagttcctgacaccgattttgcaagcaatagctaagtttgttaaccataattgcatgcccataaaggtaagcattacatgacacaattctctgccgcttctctcagaagaggtttaattttagtgttggctcttcaacactgtccccgtttttttttttttcatgagcatcttaaatatgtgtcaactaaatatccagtagtggagttcatcattgggcagggcagagaggagagagcggcacgccggcagcacctgtgctggagccacctgctctcacctgagcccacattgatccaagagaaactgcagacgcactgacatgcccggctctcaccatcacctccgccagcaatcctgtccaccgcggctctgtgtttctgcatggtgtttgctcaaagcaaacggtcctgtcaaatggcccataacagcgctcagagggtcaatcacaaaggaggcactttcctcattgttcatagtcaagaagataacttcccaaatccatccaccccatgttagtaggactctgcccaagatcatcactaaagtccctgaaaataagcggtatgaaatgcaaattccatgccagctaacataaccagggacctatatagcatttctgcatgtgctaagacacacaaaactaagatttgttccatcctcctttcttctgcctcaaggaaccctttagattagaaccctatacaatactggaaactgtgaggtcactggagtgacctaatctacaacactgtgatcgcctgtcaaagtgccgcctgatcccaaagctctctgaggtggcattaaggatcagtgctaatatctcagcaacctctcagactctccagaaggaaagcgagtgcgtgaaattaaaaaaattaccttccggctccacaaaagatgcacaagtcaccaaggctatttttttcatgtcactagttttatcctctaatatttcagtcttaaaattgcagtgacaccagttactgcaaaaaggacattctagaaggttttatatagcttgtgcccactccacccccaaagtcataacaaaaatgtacaatataacatttgttaaagacaattaccatcaagtcaatgttaatgggacctgaataccagggataagagaagtacttatatcacagcaaccagagccttcgaaaaaactcataacccttcagtcttaaccaaaaattgtataagccaatgtgaattattcccaaaacatcatcagagtgaagcatattgctaagagtaatcagccaagctcatgtaaaaatgaaagcaaaaacccctacggtgagagaaacctgagttacctggccaagccaaagatgatatttttcttccattcacagcacattaaaaagtgatctcaatggccacttcctgggaagcagggcctcccctcatacctggatgctactgcatcttcctaccgccctgctcctgccgcgggaagaatgacccctactgccaagaaactcttggagaaaatatgagaatagatcagtcttcccccccacccccccacccccgcaacaacacacacacacacacggaaggggagggggcggtccctccgcaaacagtagcctcagcaaaggggcacccgaggaagcgacactctggagttaaccccgacagtctgggtcaaaaaccaccaggctgagacccccaggtgagggaaagagcctactgaaacagagctcttgggtaaacgggagagaaaagtcctctttaattcactacctaaaaaatggagctctggcttggtcagagacgcaatgggtactgaggcccagaaaggcaacaggaaggatcccaccctccccgagatcatctatcgtcggcagcgaccccaagagggttttggcaaaggcgtgtctagtcacagaagggagacagactctccacgtaccctaggtacccggccaggggcaaaacagactgggggttctctccgaagccaggaaggtgctgccagccgagaggagggggaagaaggacttccctgatcacccaggaggccaagacatgggagacataggttccccgagtcataccccggacaccagttgcttcacagcccttctccctccccttcccgctccgggagggcttcccgggggtctcgggtcccggagggagggcgaggcagagaagcttcgtccagagcagtgagggtcgtagagctggagcagaaagggaggaaaaactctagcctcagctcccccgtctgcttcctccgcccaggccgcacggaagcctcggcctcacgtaccgagcgctgccgggctgcccgacctgcccccggcccgggcccgagaagcgagaggcagggatggcagcggccctcgaggggaggtgggcgccagacgggtcccccgaagcccggtgggcgaggggtacaggagagggggagggtcccgggcccatgcggcctccgtcccagctcgcgcggcgggtacttacgttgctctgggggtcgatggcctgcagcagccggtccctgatctgctgcggagacgccggagccgctgtcattgcctgggcgaggcggggggttgcggccgggccagcgggcgggcgggctgaggcgggggacgggggtcactcactcgccggcctccgggagccggagccgcatgttccccgcggcgccggggggttgggggcgcgcggggtggcggagaggggagccggggccgggtctcggtcccgggccgccgccgccaccaaaggaggaggaggagccgccggagccgccgccgctcgctgccgccgcctcgagaaccaaactccagtgagctgcccccgcgcggagtactctgggtagtccgcgccgcacgcagcgtcggcgccacgctgaggaggttgggagatggggcgggcggagacgccaggcctgggcggggctgcccgtgtgccacgccccgcgcctccgcgcaagcgcgcgcaggcgcactcgtccgcccgtgacgccccgcccagccgcccggcctaggcagccgttgggaggaggttgggcggggcaacggcccccgtccaggtcacggggcggggctttctgacggaagcgcgcgcgcaaagagtccttgaacccggacgctcgcagcggctacctcggggcggggagggcggcgggaaaatccttcctctgggagagccttcccggcgcgtgactgggggacgggagtcgcaggctgagcagctgccgagttttttgtgagggcgagggaaccagacgtccacgttgtgattctgcgcgcagaagggtcatcggagtccgggggtgtcgccgcggcccccccgcccctcagagggtgtgggaatgggtgtggtggcagggcgggggtctgcaccgccacgcgcgaccccgatcgcgaaaacgtgaggcggcaaagcgcctctggcagaagccgcccgccgtagctgggaaagccggaggttgcaaatctgcgtctacgcggcggcttctccacctcggcaccactggcatttgggcgggatcgctctgtcttcggggcgggtcccccgatctgtcggaagttgagcggcatctctggcctccgaagcgccccctcccccaatctgcagtcattgccgccgtcccttgtgggggcacagtccccccgcccccccaccggcagagaaccccgtgattgaaagacccttctacccgcctctgccttgagattctgtaaaactgagatgctcattctcttaaccaaacacgtcacagaggaggaaacggaggcccaaggtcacctagacttcggggttaagcccagaaccgcagatgtcaagtttaagggcgcccctcctccctccaccctgtttattgccttggtaattgctcccctctctctgggagctctgttggaaatgctcttgtgagacgggatggaaaggcaagctcggcggcctcgggagaaatcttttttttcccactgttacaggaagacctagatttaaaacaggaggaagacagctgatgagaaccacatgtgtgccttggagctgcccgacacctgttagtcttgtatttgttgtgcttctgggaaatattttcatttgcaaaaacggctgcttctgcacgtggctatggttgcgtgcttctgcacatgtgaaaagttttacatcacacttggaggagaaaagaaacacgggcaaaacacttgtcatttactgctcccaacctcgcccctcccagaatgcggtgcattgtgtacatggtgtacatggtccaagttggaaactggcccattcggagataattctctcatttctgataagcaaaataagcaaagccttcctcaggcatattctggtcttgcctctctcttaatttctaactcggatgtacagtatctttttttttttttaataaagtattacataggaggcaatttattttgcatgggtcaggttattttaagaaacatttgggccggacgtggtggctcaagcctgtaatcccagcacttcagcaggcggaggtgggcgatcacttgagctcaggagttcgagactagcctggccaacatggtgaaaccccatctctactaaaaatacaaaaattagccgggcatgctggcgcgcacttgtaatcctggctactagagggggctgaggcagaagaattgcttgaacccgggaggcggaggttgcagtgagccaagatcacaccactgcactccagcctgggcaacagactctgtctcaaacaaaatgtggggccagccacggtggctcatgcctggtagctcatgcctgtaatcccagcactttgggaagccgaggtgggcagatcacttgcggtcaggagttcgagacctgcgtggccaaaatagtgaaaccccttctctactgaaaaaacaaaaattagccgggcatggtggcacacacctgtaatcccagctactcagaaggctgaggcacgagaattgtttgaacccagaaggcagaggctgcagtgagctgagatcacgccactgtactccaacctgggtgacagagcaagactgtcttgaaaaataaacaaacatctggaaagtactcaacttacccactttttaaaaactaagaagcactgacatgacttggttcctcaagggcactggctctttttggtatccccagtagatagaaaaatagtatctgtggagtaagtcaatgaaaagtttcatcaaatacacggtagcgttacacacacccccagacatatgaatgcatttcagtttctacagatctggtacaccatgggtctggagagctatttctggaatgaatgaaatacttcataaaatataatactatatacaccaggatacacaacacacacacggatatttagttttattccacatttaatgtacgtaaaagggtgtttttgtaaatgcaaagattaaatcagacagcctctgaattgtagtcttgaaaacattagcaagttcttttaggtccagggtagatactgcagttcacttagccaactttctgcattgagacatccttgccagggatcctgtcagttatgcgaagatgcggcacgagataattcctcttgctgtgatggttcgtcctcaatgacaggtcccttatagtatttaggtacaacaaggtcttttgtgcttggaatgcccttgaaaaagctgcctcacctgtttgtgaagggaaccccaaagagaaagggagaggaagggctgggtgcagtggctcacatctataatcccagcactttgggaggccgaggtgggtggatcatttgaggtaaggagttaagagaccagcctggccaacatggtgaaaccccacctctactaagaatacaaaaattagccgggcatggtggtgggcacctgtattcccagctacttgggaggtagaggcaggagaattgcatgaacctgggaggcagaggttgcagtgagccaagatcacaccaccacactccagcctgggtgacagagcgagactccatcacaaatataaaataaaataaaataaatagaaaaaagggagaggaagtagttcagagtccatgacttgctcttgccatgggaaaaggcaaggaagttagtgtcaggaggtcaagtgcagagcatcttcagccaacctggacagtgagggagtagaaggatgcttctccctggactcactgctgtggcctaagcaggaaccgggatattcaagagcactgcagaggaagccgtgacgaggcaggttcacacagctgtacaggaatagtcttccacagcgacaccttgtaatagccaggagcaacagcaggaatgcgctcatcagacatgtcagaagcaagcccctgagagacaggccatttaaagcacagggttactaaacttaccctaataagggatgtgagggctccagggattaacagaaaaagccagtgtgacaaaaacaaccaccctcctttgacccctatgtttgctttaacaggcgggtggaattttttttttttttttttcgagagagtctcactctgttgccagtctggagtgcagtggcgtgatcttggctcactgcaatctccgcctttcaggttcaagcgattctcctgcctcagcctcccgagtagctgggactacaggcgggtgccaccacacccagctaatttttgtatttttagtagagacagggtttcaccatgttggccaggatggtctcaaactcctgacttcatgatccgcctgccttggcctcccaaagtgctgggattacaggcatgagccaccacacccggccgctggcagaaatttttaaaaccctttctcatatatgaactcattcaaccctatcagttatctcagaagtacctagagatgagtttcatagttctgcttggctttgcactaagtcttgtttactctaaaagtgaaaccaatttaaattggttttgactaaccttgacatgtcaaagataggtagaagacctcaattttttaatcccatcttcaagtagggatggggatacagaaaggttccagttctgaacgcaagccccggaacctggttggggggtgggaattcatgaatacaatactttaattgcactgtacaaacacaacacggctgggacaccaacgaatgaaaaaagtcattaactgtgaacattttttttttttttttttttgaggcagagtctcgctttgttgcccaggctggagtgaaatggtgccatctgggctcacctctacctcttgggttcaagtgattctcgtgcctcagcctcctgagtagctggaattacagttgcatgccaccatgcccagctaatttttgtatttttagtagagatgcggtttcgtcatgttggtcaggctgctctggaactcctgacttcaggtgatccacccgcctcagcctcccaaagtgctgggattacaggcgtgagccaccatgcccggccaactgggagcatttcaataagctcataccctctgaccctgtggatatgagcgtactgaaattcacaacttctaaaagtttatctgaaggaggcaatcagatgtagacaaatgtgtatgtacaaggaagttcactgaagcactatttgtaagagtgaaagattggaagcaatgtaagtgcctagcaataggggagtacgtaaataaactgtgattagttccccacaatgggaaggttatgaattagaaggcgccacagggagccttgtgggtgctacaataatctaagcctcaatgtgagcggtgacctcactggtgtttgtacatgtagaaattcaccaagctggccaggcgcggtggctcacgcctgtaatcccagcactttgggaggcagaagtggatggatcacctgaggtcaggagttcgagaccagcctggctaacatgatgaaaccctgtctctactaaaaatacaaaaattagctaggcaggtggtgcgcgcctgtaatcccagctgctcgggaggctgaggcagaagaatcacttgaacccaggagacagaggttgcagtgagctgagatggtgccattacactccagcctagacaacagagtgagaatctgtctcaaaaaaaaagaaaaaaaaaaaaaaaaaaggaagaaattcaccaagttgtacactgctgtaaattaaacttccaaagtaaattaagtgtgtgcgtgtgtgtgtgatgttgtcactaagaaaacctgtattgagctgggcacagtggctcacgcctgcagtcctaactactgggaggctgagacggttgaacccaggagtttgaagctgcagtgagctacaactgtgccactacactctggcctgggtgacagagcaagatcccgtctcttacaacaaaaataaagccactattgatggagaaacgctcccaataaataataaaatgcagcatataaactatatacattgtgatcttaattatacttttattaaaatatacatacttatgcacagagtgaatagaaaaaatattggaaggaaaccaaaatattgacagcagttatctctgatagatagaatgacagatgatgtttattttcttcttacactttttcctagattagttctgcattttccggcattcatatgtattgtttcccagccatcctgtcaagcgctgggattgttctgatctctgggagcctccagggctgactccagtatggctaatctaaagtgagcttgtaatctccaaaatcctgatggtggcttttctattaggcagactaatagattcagatataggtcccaacagtttgtgttttccttactgtcccagttttatatcattattcttagtactaaacagagtgacaacagggagtgacatttgttgaggacctacgatgtgtcagggtccatgctggggacttcacatgagggctccatgaagcccccttggacactcaggtccttgtgtcatccccacttcccgcccgccactgacgctggggtgaacctgcaactcactgtgactaagagaatgcagtggaaaccatgctctacccagtccaggctaaagctttaaggaggcctggaagttaccacacagcccagcaattctactcctaggaatctccctcaagaaaactgaaaacatggctgcgtgcagtggctcacacctgtaatcccagcactttgaaaggctgaggtaggcgggtcacttgagctcaggagtttgagaccagcgtagccaacatggcaaaaccctgtctgtactaaaaatacaaaaaattagggaggtgtggtggtggatgcctggagtctcagctatttgggaggctgaggtaggagaaccacttgaatccaggaggtggaggttgcagtaagccaagatcgtgccactgcactccagcctgggcaacagactgagactctgtcttaaaaaaaaaaaaaaaaaaaaaaaaaaggcaagaaaactgaaaacatatactcacagaaagacgtgcgtacatgtaaatgtccatagcagcactgctcataatagccataacgtgcagacaacctgccccacctgggttcctagccagccttctttctcaccactcttgagtgggtcttctcatacctgtcccactgggcacccaagcatgcaaccaagtgacgtggtcttcgtgcctcaaaggagtgacccagccaaagtcatgtggctgggatttggggctggctaaagagtccagcccgtggccgggcacagtggctcatgcctataatcctagcactctgggaggctgaggcaggtggatcacttgaggccaggagtttgagaccagcctggccaagatggcaaaaccccatccctcctaaaaaaaaaaaaaaaaaattaggcatggtggtacatgcctgtaatcccagctactcaggaggctgaggcaggagaatcacgcgaacctgggaggcggaggttgcagtgagctgacaagacagtacagcactctagcctgggtgacagagtgagacaccatctcaaaaaaaaaaaaaaaaaagtccagcccagagctcagggttcccagactctgaaccaaatcaagtataagccatttccccaaagagcagacaggagaggaccaaggtgctgatgtccaaaaccaactaggagggtggatctgaaggaaaaaaacaacaaactcaccctagccaatggagcttcccagaaacaaaggtgcagagttgtgccccaacacagaaggcaacatcaagagagtagccaggtgcagtggctcacgccagtaatctcagcactttgagaggccgaggcgggcggatcacttgaggtcaggagtttgagaccagcctggccaacatggtgaaatcccatctctaagagaacgacaaaaaatttagctgggcctggtggcaggcgcctgtaatcccagctacttgggaagctgaggcaggagagtcgcttaaacctgggagggagaggttgcaatgggcccagattgtaccactgcaatccagcctgggcaacagagcaagaccctgtctcaaaaaaaaaaaaaaaaatatatatatatatatatatatatgtatgtatacacaatttgaccctgtgttagcagagtacttgcccctactcccctaaatgtccccatcccaatccccagaacctgtaaatatgtcatggcaagggataattaagggtacaggtgaaattaacataactcatcaactgactgctggattctcctggtggccccaatggagtcacaagcgtccttaaatggggaagaaagaggtagaggagtcagaattaggagacagggtgtcatgaggaagacttgacaggctattggttgcctggaagatggaggaagaggccgtgaaccaaggatgtgggcagcctctaaaagctggagaaggcgaggaaaatttctccctgagagcctccagaaggaaccagctatgcggacacattgatgctagcctacagagacccattctgtacttttgacttccagaattgtaaagaataaatttgtggaatttttttttttgagagtctcactctgtcacccaggctggagtacagtggtatgacctcgactcactgcaacctctgcctcccgggttcaagcgattctcctgcctcagcttcccatgtagctggaattacaggcatgcgccaccacacccagctaagtttttgtatttttagtagagacaaggtctcaccatgttagccagactaaatttgttttgtttgacaccacgaagtttgtggttattttttacagtggcaagaggacacgaatacggctttaaagaaaaagctagccaggcacaatggcccatgcctataatcctggcactttgggaggctgaggtgggaggactgcttgagcctgggagttcaagaccagcctgggcaacatagtgagaccccatctctacaaaaaaaataaaaaaatagctgggtgtggtagcatgtgcctgtagtcccagctactcaggaggctgatgtgggaggacagcttgagctcaggaggtttaggctgcagtgagctaagatagtgccactgcactccagcttcagctacagagcaagaccctgtctctaaaaatataaagaaagaaaatttaaaagtaaagaaaaagtggatcattcggtcctttaagatgtggcactgcccaattagaactttcctccatgcaatgcaattacagtcactgaggcactggattttctagttttatttaactaagacggagactgaaacagccacacgtggctcctggctactgtgctgctgaacacaggccctcactactcaaaagtgtggtccgtggaccagcagtattagcattaccagggagctccttaggaacataggtccttgatcaggtgtggtggctcacacctataaccccagcactttgggaggccaaggcaggaggatcacttgagcccaggagttcaagaccagcctgggcaacatagtgaaacctcgtctctacaaaaaaatacattagccagctgtggtggtatgtgcctgtagtcccaggaggctgaggtgggaggatcgcttgagcctgggggaggttgaggctacattgagccatgatcgcctcacctgggtgacaaagtgagactgtgtctcaaaaaagaaaaagaaaagaaatgtaggcccttagcctgtacctccccagcctgttaggcagaatctgaattccacaaaaacacccccaagggatttaggaggatgttgaaatctgagaccctcccatggttgaggccaccagtcacttacacacaaatgccttcctctgcagcaccaggagacagagcccatcacagaacttctcagggtgcctcctacaccacactagctttgtgtgtttgttctttaatgcctcaaggcatactactagccaaggagagtaactaacagcagctgttgaacactatgggtcagactttgaccatctgttatggactgaattgtgtcacctacccatgactaaattcatatgctgaagctctgacctccaacagggactgtatttggagacagggcctttgggaggtaattaaggttaaataaggtcataagggtggggtgataagctgacaaaagggaggctggttgtggtggctcacgcctgtaatcccagcactttgggaggcagaggtgggtggatcacttgaggttagcagttcaaaaccaacctggccaacgtggtgaaaccccacctctactaaaaaaaaaaaaattacaaaaattagccaggcgtggtggtacgcacctgtaatctcagctactcaggaggctgaggcaggaagaatcacttaaagccggaggcggaggttgcagtaagctgggatcacgccactgcactccagcctggatgacagagattctgtctcaaaagaaccgtgaggcaattaaacctcttttcttttttctttttttttttttttttttgagacagagcttcactcttgctgcacaggctggagtgcaatggcacgatctcggctcactgcaacccctgcctcccgggttcaggtgattttcctgcctcagactcctgagtagctggatttacaggtgcccgccaccatgcccggctaatttttgtaattttttttagtagagacagggtttcaccacattggccaggctggccttgaactcctgacctcaggtgatccacccacctcagcctccctaagtgttgggattacaggcatgagccaccgtgcctggccattaacctcttttcttataaattacccatttctttatagcaatgcaagatggcctaatacacagctctagctgactaatataccaccatctcactgaaggcttgcaaaacccagctgagaaagtcttttaataaaagcaacaacattaataaaaacagtgacaactactgagtggctgcccagcatcaggcatgttataggcccatatcaagactgtctccttcactgtacccatatcacagatgaggacgtggaggtgcagaagggccaagacacagaacccaggtctgagctacacctccaacttgctttctgctgcaaccaccttttccaccttctttctcatgcacacaatgtactctaattagatgtaaagctttatttcccctaacatttccacagttcccttggcacagtccacactcttttgcctaggtttaccaccaactgccaagataataatgtaaactagacaccaatgaacaggaaacaggatccactagtaagatgtcatttttttttttttttttttgagacggagtcttgctctgtcgcccaggctggagtgcagtggcgtgatctcggctcactgcaagctccgcccccccaggttcacgccattctcctgcctcagcctcccgagtagctgggattataggcgcccaccacctcgcccggctaattttttgtatttttagtagagacggggtttcaccgtgttagccaggatggtctcgatctcctgacctcatgatctgcccgcctccgcctcccaaagtgctgggattacaggcgtgagccactgcgcccggtcataagatgtcatttttaaaaaactgtctagtccagagatcagtaaacttttccataaagggtcagaaagtaaataggttcagctttgcaggctgaatggtttctgttgcaaggactcaatcctgcccttatagtgctaaaggagccaaggatgatatacaaactaatgagcacaacagctgatataatttgcctgtgtccccacccaaatctcatcttgagttgtagttcccataatccccatgtgtggtggcagagacctgggggcaggtaactgaatcatggggtggttcccccatgctattctagtgatagtaagttctcacgagatctgatgtttttataaggggcatccacttcactcagctctcattcttctcctacctgccaccatgggtagaaggatatgtttgtttccccatccgccatgactgtaagtttcctggggtctccccagccgtgcataactgtgagtcaattaaacctcttttgtttataaattacccagtctcaggcaatctttcggttttttgtttttttttttttgagatggagttttgctcttgttgcccaggctggagtgcaatggctcaatctcagctcaatgcaacctccactttccgggttcaagcgattctcctgcctcagcctcctgagtatctgggattacaggcacccgtcaccacgcccagctaatttttgtgttttttagcagcagcacgatctctgctcactgcaacctctgcctcccaggttcaagcgattctcctgtcagccttccaagtagctgggattacaggtacgtgccaccacgcctggctaatttttgtatttttagtagagatggggtttcaccatgttggccaggctggtctcgaacttctgggattacaggcatgagcctccctgcccggccctttttatccttctttttctttttatagcatgccttttccttttacacaaacagcatccgtctttcatcaacataggaaaacatcaggaggcctgtcaaatatttcataaactcaaatttggtaaaggatataatgaaatggttgaaatgaaaagaaaatgccttgctaatgacagcttcgctggcttttcaaatctaaccacttcagaagagagcagatctcattatccaacatcgcactgctgctgttctgctgttctgaggagtctcagggagcctgagaggggtctttcgtctaactatcaagagaaagaggccagttgcagcagctcacgcctgtaatcccaaaacttcaggaggctgaggtgggcggatcacctgaggtcaggagttcgagaccagcctggccaacatggagaaaccccatctctactaaaaataccaacattatccaggcgtggtggtgggtgcctgtagtcccagctacttgggaggctgaggcaagaaaatcgcttgaacccgggaggcggaggctgcagtgagctgagattgcgccactgcactccagcctgggtgacagagtctcaaaaaaagaaagaaagaaagaaagaaaactgggttttggtcaattgattaaccacacttgaaaatgggagggaagatttctagcaaatttaaaaaatgtgtttgtgtatatgtttgttaaaatgcaggccacaagggtacagatgattccctgagtggctttgggagggaagggacaccttgggattctccatcacaccctagttgagcggttggcaaatttttctggtaagaggccaaacaggtgacattttccattctgcaggccatatggtctctgtgccactactccactttgaagttatagtatggaggttgctaaagcaattctaagtaatacacacacaaaggggtgtggccagattctaatacaactttttttttttttttttttgagatggagtttcactcttgtggcccaggctggagtgcaatggtgcaatctcggttcatcacaacctctgcttcccaggttcaagtgattctcctgcctcagcctccctagtaactgggattacaggcctgtaccaccacactcggctaattttgcatttttagtagagacagcatttctccatgttggccaggctggtctcgaactcccaacctcaggtgatccgcccaccttggcctcccaaagtgctaggattacaggcgtgagccactgtgcccggtcccagtacaactttttcttttggagacagtctagctctgtcgtccaggctggagtgcagtggaaaaatctcggctcactgcaacctccacctcctgggttcaagcaattctcctgcctcagcctcctgagtagcttggactataagcgtgcagcacgacacccggctagtttttgtatttttagtagagaaaggattttgccacagcggtcaggctaataagggatcgcctggctcagcttcccaaagtgtggggattacagttgtgagccaccgcacccggctccaataaaactttatttacaaaaacaagccgtgggccagacatgccctctgggctgtagtttgctgactcctgccctagagcagatgtacatgaagggcaatgagaagcgcgtgcaaaaatacattctccttcaatgtgcaatggtggaggaagcaaaatgggttccaacatgaaccccaagtgaacactcccagggtaggtgctgtacattgtggccttctctgcattcaccacccacagcttatcacttcggcagtgactcccagcctgtagccttgttttctaatacacaaaatctgaacacaaaccaagtgcccatcaactggggactggttaaattaatcatggtatgtctttacaatggcgtatttgcagttattaagaatcatattgtgattgagcacggtggctcatgcctgtaatcccagcactttgggaagccaaggtgggtgggtcacttgagggcagaagtttgagaccagcctggccaacatggtgaaaccctgtctccagtaaaaatacaaaaattagctgggcaggcacctgtaatcccagctattcaggaggctgaggcatgagaattgcttgaacctgggaggtggaggttgcagtgaaccaagatcacaccaccgcactccagcctgggcgagagtgagactgtctcaaacaaacaaaaaagaatgatattgtggttcatgcctgtaatcccagaaatactggaggccaaggtgggaggttcgttgagcccaggagtttgagagcagtttgagcaacacagggagaccctgtctctcccaaaaaataaaaataaaaaaataattagcctgtggtacatgcctgtggtcctaggtacttgggagactgaggtgggaggatcgtggctacagtgagctctcatcacgccaccacactccagccttggcaacagagtgagaccttatcttttttttttttttttttgagacagagtctcactctgtcacccaggctgcagtgcagcggcgcgatcatggctcactgcgacctccacctcccaagttcaagagattctcctgcgtcagcctcctgagtagctgggattacaggcgtgcgccaccacacctggctaatttttgtatttttagtagagacggggtttcatcgaactcctgacctcgtgatccacccgcctcggcctcccaaagtgctgggattacaggcgtgaaccaccgcacctggccaagtgagactctgtctctaaaaaaagaaaaaaaaagttattttagaaaacaacacatttgaggatatggaagtatggttacagtatcaggtgagaaaaccatgctggaagatactaagataacactgccaaaagaaaatgtaagcaccacacctagatgattatgcacagaagaaaggttggaagaatatgtacctagggtgatggtctccggagaatgtgactatgggtgatttatttttcctcttctagcaagtatgcatttgataagtttcttcaatgaatatgcattagtagtttaaaaaaaatttttcttttttgagacaggggtctcactgtgtcactcaggctgaagtgcaccactcggctcactgtaacctccgcctcccgagttcaagtgattcctctacctcagtctcctgagtagctgggactacaggcatgtgccactatgcccagctaatatatgtatgtttagtagagatagggtttcaccatattggccaggctggtattgaactcctggcctcaagtgatctacccacctcagcctcctaaagtgctgggattacaggcatgagccaccgtaccaggcctaaaaaattttttcaagcaaagtaaaacaaacaaaagccacttaaagccacaccaatggtatttaaggatattatggacccctccatggttatctgcccaaggaagctaatgccacaatagaagccaatgaagatcacaacactggtgccaggggcagccctgatcacagtggacaaaatataatccaagtccagcaacaaggtggctaaggacctatttactgacactgcaccgtaagtaaaaatgagaactgtaacacctcctagcaacaaagcaagtgtaaagaaaatgatgctgaaatgaacacagcagaactcatccttccttatccactctcaaaacatacatacaggaatatggaaaatgctgcatggggatggtgaagacaggaaaaggtttaccaggctggaaattgtttgcgttttttttttttttttttttttttgagatgttttgctcgtcgcctaggctggagtgcaatggcgcgatctcggctcgctgcaacctccgcctccctggttcaagtgattatcctgcctcagcctcctgagtagctgggattacaggcgcacgccaccacacctggctaatttttgtattttttagtagagacggggttttgtcatgttggccaggttggtctcgaactcctgaccacaggtgacctgcccactttggcctcccaaaatgctgggattgcagggtgtgagcctctcactgcactcagtctgtttgtaacttttttttttttttccgagacagaagatcttgctctgtcacccaggctggagtgcactggcacgatctcagctcactgcaacctccacctcctgggtttttaagcaattctctgcctcagcctcctgagtagctgggattacagggggcatgccaccacacccagctaatttttgcatttttagtagagacggggtttcaccatcttggccaggctgttcttgaactcctgacctcgtgatccacctgcctcggcctcccaaagtgctgggagccaccgcgctggcctctgtttgcaattcgtaaaaatgctgtcatcagcctttaatggtgtgtgtgcagactgcacaaagaaaagtggatgagaagacagaaaacacacacggtgatgatacccacagcaacaggtgctctcaggcactcagccgcattcgagttcattgaaacttacaacaaccttaggcacacactacttgcaggccgattttagagatgtggaaactgaggcttggagaggagaaagcaattagccaaggtccctctcagaatgagctgagatgggatttgtactcacacctaactgacccagaacattagtgcttaaacactgtgagacactaggcacccaaacttcaaactctgataacctctggtgccagtaaagttcttgaaaagcttccttaagagacacaaccatgagattccatttttaaaatgtacagcagccaccaaccagcatctgaaaaagccacgctgctattattaacaatgagacaacagttctctggagaaaaagaggactattgaaacaaaacctcaatgacaggattctcttctgagagcacgattcatccccataatggacaaatgcctcgcctcattgagacctccgcgccagtctgaataaggcaggaaggtttcttcacaccattcatctggcctgtgagggacccagccaagatcttggcgtgcctgttctgacagcgacaccggcctcagcaaagccagacccagcagctccgatctctgctacttacagaccttggggtgatgcttggctgagatttggcaaggaaatgaattgcagaagtgatcaaggagaattccacaacctgagaggcagcaaaagtggacttgaccctggtctagcaagagcccaccattagcaatgactctttcaatactttcaggagcagctccagtcaaaattccacttactcaattctttttttttttttttttttgagacagaatctcattgtctcacccaggctgaagtgcagtggctcaatctcagctcactgcaacctccgcctcccagatttaagcaattcttgtgcctcagccacccgagtagctgggattataggcgtgtgccaccatatctggctaatttttctatttttagtagagatgcgatttcaccatgttggccaggctagtttcgaactcctgacctcaagtgatccgcctacctcggcctcccaaagtgctgggattacaggtatgagccactgcgcgcagccccacttgcccaattcttgaccatcatttattgagctaaatccaaaaaggaaactctaccactgactcttttctttctcatggcctccaaaatgaatcctaggtttttccagcagggtaaattcaaaaggactcaggttggaaattgacttcttggttaaaaaaaaaaaaaaagtataaacaaaaggtcctttttagaaatgaggtttattttcaaggctactcagtcctaaaagcctgcatatttactttttttccttcctccaggtttacctccaagtcaggatttcaaaaaccaccaacattcaggctcattcttattggtataaacaaacaaacaaaaaaaccagacaacaaaaaactcaacaagcaaatcacacagttgtgggattcagcgccaaccccgggcgtttcattttggcaacaaaaccaggattccctttcaaagaagcttctggaaaatgctgtatttcctagatgaaggcccctggtttttcaacctcaaaatcacctactcaaaaagcagactcagaaacccaaggttttagaacatggtcccaatgtaccacatcataaaatcactctcattcctgcaactgtacaatgaatggctcccaaagtcattttatttaacaaaggggtcaaggcagaggaaagtttcccttaatatccccacaactgctccacatgtcttctgtggaaacacttcaccaggaactagctcaacactcttgctaacaatttagtgtctatacaggaaggctggtgtctctgttacaggtggcccgttccttaaagcctttagggttaatcgcagctgcactgagtggccaagcagaccctgttgggatgtgaaagcagtttgttaacagggcccctggccgggcccagaggctgtcagactcagcaagtaacactgaatgtccaaaaatacggctgtgttaaactaacaagccaatccttctgctcagatctctggatagaaatgatttttcttttatctatggggaatgcaatttcatcacagccccttacataaacgctcctgaaaccctttcagtagacagcatttcaattcagagaccaaagtgaaactatctttgaaaacagggacgtggctgggaaaccatgcacacctcggcgaacacttttccacccaccacgagcttggactttctgggaaggttgtcggttttctggtcaaaaacattcttgaagtcatcaggaatggaggaatggagactcggcatcccgggaaagtgagttcctggtttcatcgctgggattcaagagccgaacagcctggagaagtcagagggcagaaatgtctgtgaggataggaggtgactgttctaaaaatattgtcagcgattattttacatgactattacctattacttagatgattttacatgattgtctgattttttaaagtaacctgtgatccacctgtgaatataattaacaatactgaactacacagttaaaagaagaatatactctttttttttttttagacagagtctggctctgccgcccaggctggagtacagtggtgcgatctcagctcgctgcaacctctgcatccgagattcaagcgattctcctgcctcaacctgctgagtagctgcaattacaggcgcctgccaccaagccagattaatttttgtatttttagtagaaatggggtttcaccatgttggctgggctggtttcgaactcctgacctcaagtgatccacccgcctcagcctcccaaagtgctgggattacaggcgtgagccactccgcacagccaacaccaccaccctataagggaaagcggtacagctgttaaacaaaagatatatacaggaactttcggtattatctttgcaacatttccacaaatctaaactcattccaaaataaaaaggttatctgaaaaaaataagagtgcagaaacagctggatttccacatgcaaaagaataaagttggacccctgctttatgtcatataaaaaaattcactcaaaataggtcacagacctaactatcctccagaatccaaactacaaaactcttggaagaaaacttacgtgtacatctttgtaaccttgggttacacaatgatttcttactataatacccaaagcacaagtgacaaaaagacaaaaacataaactcaacttcatcacagttaaaaacttttttttttttgagatggactctcactctgttgctcagggtggagtgccgtggggcgatctcggctcactacaacctctgactcctgggttcaagcgattctcatgcctcagcctcccgagtagctgggattacaggcacccgccaccatgcctggctaatttttgtacttctagtagagacggtgtttcaccatgttggtcaggccggtctcaaactcctgacctcaagtgatccaaccgcctcagcctcccaaagtgctgggtttacaggcatgagccaccatgcctggccattcacaataaaaaacttttgtgcttaaaatgacaccatcaagaaagtgaaaagacaacatacaaaatgggagaaaatgcttgcaaaatacgcacgtgataatggactgataacgagaatacacaaagaacccttatggatcagcaataacccaatttttaaaaagggcagagaatcttaagaagacatttcctcaaaggaggtggacaaatggccaataggtacatgaaaatatgttcaatatcattaaccatcagggaaatgtgaatcaaaaccttcgaactggctgtgcacagtggctcatgcctgtaatcccagcactttaggaggctgaggtgggtggatcacttgagcccaggagttctggaccagcctgggcaacatagcgaaacccagtacttcttgtagagacaagaagtacaaaaattagccaggtgtggtagtgcacacccatagtcccactacttaggacgctgaggccagaggatcacttgagcccaggaggcaaaagttgcagtgagctgagattgtgccactgtactccagctccagcctgcgcaacagagtgagactctgtttcaaaaacaaacaaaaaactttcatacctactaggatgaccacagtcaaaagattaacggtaacagagttggcaaggatacggagaaagtgtaaccctcgtaggctgcaggtaggaatgtaaaatgtcgtagctactttggaaaacactctggtgttttctcaaaaggataaacacaggtcggctttaatctcagcactttgggaggttgaggtgggtggatcacttgaggtctggagttcgagaccagcctggccaacgtggtaaaaccctgtttcagccaggcgcagtggttcacgcctataatcccagcactttgggaggccgatgtgggtggatcatgaggtcaggaattcaagaccagcttggacaacatggtgaaaccccgtctctactaaaaatacaaaaaattaggcatggtggtgcacacctgtaaccccagttactcaggaggctgaggcaggagaatcacttgaacccgggaggtggaggttgcagtgagctgagaacgtgccactgcactccagccttggcaacagagcgagactctgtctccaaaaaaaagaaaattataaacgtagtgtgatcatataacccagcaatttcactcctatatagctcataactaaaaacataaatctgtacaaaaacttgtacatgaatgttcttgtcaccactttcataatagctaaaaaatacaaacatttcaactgtccaccaactgacagatggaaaactggggaatagtcatacaagagaatgattctgccatgaaaaggaatgaagcactgctccaggctacaacgtggatgaacctcaaaaacatgatgctgagtgagaggagctagacacaaaaggccatgcagtgtatgactccatttatataaactgtccacatgaggcaaatccacagagacaggaagccgacgagtggttgccagggactaagggaggggaaatggggcgtgactgccaatggggacgcggtttctttctgtgttgatgaaaatgttctgaaattggatagagatagcggctgcataatcctgtgaatattctataaaataccggattgtgaagacagacttccgccttttacttgtaaaacctctccatggttcattttctccctaacttttcctcttgttattttatgaaaatttcaacacacagaagagttgtgttgaaacacactgccaccacctacattctgcaattaacactttgctgtaccacatacctatccatctatctaaccatttatccgtatttttgatgtgtttcaatgtaagttatagatgacagtgctactgatccctaaatactcagggacgtttctcccctatttcagacttttcataacttcttaaactttccaaagctcaaacaacacaagagtgggcacagggagattgggcacggtggctcacgcctataatcccagcactttgggaggccgaggcaggtgaatcatttgaggtcaggagttcgagaccagcctggtcaacaggatgaaatctcatctctaccaaaaatagaaaaattagccaagtgtggtggtgcgtgcctgtagtctcagctccttgggaggctgaggcaggagaatcacttgaacctgggagatgcaggatgcagtgagctgagactgtgccactgcactccagtctgggtgacagagcaagactccacctcaaaaaaaaaaaaaaaaagaagaaataggcacacggaatattgaaccatgcccaggctctgccaatttcctcagcaactgccacagggtcacctctctaccccatctggagtggatccttccaactccctggctaaacagtgtttcactcccatacttaaggcactcatttaaggtttatccatggttactgcatgcacattacacagctgaagttaggctgcacagacatagtaccctccggccttcttcactttcagaacgtttcatttccccatgcagacagaaccttctggcacatcatcagtgatggtattgtgacagccagtcacatgggcatccttcaagttacctgatccttcccctgttcttggacacttaggtgatttccagtttttaaatatcctgggaaagccagtcactacctccctgagagggccctttcttgagagaatcttctctcacccatggcccccagtgaaagagttggcctgggtcagaggttggcacattttctctgtaatgggtgactgtttactaacagttctggctctgcaagccatgtcatctctgtcacacaactcaactccaccgctgtgacacagaagcagccacacacatgaacttttgcgaagttcattcacaaaaacaggcagtggggagatttggcctgtggtctgatgacccttgacctaagtggttatggcagaatcaagaacccccaccccaaatggaccagagtgacaccaaggtgggtcaatcagactctgccccaggaaacaaaatcaggaccctgggctactgactatgcaggtcttggaaagttgagctgggaggatgcccgaggctgctgttctggtcacagactagcagatgagggagtgaagatgctggtcaaacaggagaggatgatgaagcaggtgcacaggaaagacgagaatgagagaagcacactgacttcttccctgccccaggacctttgcaaagatgagaatgagaaccatgctgacttcttccctgccccaggacctttgcaaagacgagaatgagagaagcatgctgacttcttccctgccccaggacctttgcaaagatgagaatgagaagcatgctgacttcttccctgccccaggacctttgcaaagatgagaatgagaagcatgctgacttcttccctgccccaggacctttgcaaagacgagaatgagagaagcatagaagcatagtgacttcttccctgccccaggacctttgcaaagacgagaatgagggaagcatgctgacttcttcccttccccaggacctttgcaaagacgagaatgagggaagcatgctgatttcttccctgtcccaggacctttgcaaagacgagaatgagggaagaatgctgacttcttccctgccccaggacctttgcacatgccacttcctgtgccaccatgcttttctccagctctgcaaatggcaaacgtcttcttgtcctttaggtcttgatttattattatttgtttggagacagggtcttcttctgttgcccaggctggagtgcagtggcaggatctcagctcactgcaacctctgcctccagggctcaagtgattctcccacctcagcctcccgaggagctggaactataggcaggcgccactacactcggctaatttttttatttttggtaaagacagggtttcaccatgctgcccaggctggtcttgaactcctgggctcaagcaattctcccaccttggcctcccaaagtactgggattacaggcctgagccactgcccctggccgttcctacaatttcatgtaagttccttgatctcctcacaagccttctttgttcctaggcaagtctcatacatgctctcagatcctctctgccaggtaggataccttggcaacagtcttcctgggaatacatcacggtccttgtgatgagggtgaaatgccatcctccccagatctcctatgtcctggaagcatcttcgcaaacagccactggggtggcacgcagactggacagcaaccccacattcggagtctcaatcactcaggacagacaactttttgtcctctctctttctgggggaagcatacagggatggacccacagaggccaagaacaccagattctcccgtcgtgtcttttcctaaatccatttacagcaaatctcacaattcgttaacagtagtatcagagttatggccccagtgctagatggaaaggcaatctgcttgagttttctcagcctaatgagaaaatgaaaagccagaatttaaaacaataaagtctgaatacatttctactggcttccagcccaggtggagcaggatctggcagtgtgctggacatttaaaccatattttccacctcggcagatgcagaagaactggtgagacgtgacagggccatgggctcagggacggcatctcctggcagcccctgcagaggtgccgggcatagccgggggctggagaactccatgttccaataaaagttccagcccggtttggtggggacacagggacagagtttaaccccttcagatactggttccctcacttacttattttgaaaacagaaagcagggccgggtgtggtagctcacatctgtaatctcagcactttgggaggccgaggcaggtggatcacatgaggtcaggagttcaagaccagcctgaccaacatgatgaaaccctgtctcttgtaaaaatacaaaaattagccaggtgtggtggtgggcacctgtaatcccagctactcgggaggctgaggcaggagaatcgcttgaagcagggaggcagaggttgcagtgagccgagatcacgccactgcactccagcctgggcaacagagcaagactcgatctcaaaaacaaaaacaaacaaacaaaaaaaacagggccgtgcacagtggctcactcctgtaatcccagcactttgggagcccaaggtggacgaatcacaaggtcaggagatcaagaccatcctggataacacgatggaaccccgtctctactaaaaatacaaaaaatcagccgtgtgtggtggcacgcacctgtagtcccagttactcgggaggctgaggcaggagaatcgcttagacctaagaggccgaggttgcagtgagcccagatcgcaccactgcactccagtttaggcgacagagcaagattccatctcaaacaaaacaaaaaataaagaaaacagaaaccaggatacaagagtgatgactgaaaagacagagaatgaccatcaggtgggtcaccctggagaaggagactaagagacgacagtgaaaggaaagggcaggctggactcacacaatcatgcagaacatcatgaagatgttccacagggcgatgaagattcgaaagtatctgaggctcagcaagaattcccggatgttgtcacctggaagaatcagaaagcacttttatggcacagctaacatcccatccctactgccacctcagcagtggatttttgtgacttccacccacccggcgcttgctgcctccaacttcggcaacagtgtggcttttccttttggtttctccctcttccctaccctcatcaggctgtgtctaccactgaccaatcccctgaaagcaccaagcccctctgcctctgattggctcaagaaggggcatgtgacccaagtctgtccaatgagagtccaccctgggacttttcccccaactactgggaaagagataccttctgccaggcttactgagctgggaagatgtaagctcagtaagctcagtgcccacaggccaaatccagcagcctcttccacctgtttttggatggcctatgagctaatagtttttacttttttttaaaatataaagatggggttttgctatgttccccaggtgggtcttgaactcctggcttcaagtgatcctcccgcctaagcctctcaaagtgttgagattacaggcatgagtctccatacccggctggtttttacattaaaaaaaaaagaaagaagactattttgtgagacacaaaaattacaagaaattcaaatctcagtgtcaatgaataaagttttatggcacacagccatacccattcatttacatatcatgtcctgctgcttttgtactacaacagcagagctgagtcacattgttgtgccagacagacaccatatggcccgcaaagccctcagatatttactatgtggccctctacagaaaaacatgccaacccctgctctggggtcatctttgccaaccctaaccagtctcacagtaaaaccaacataaaagaaaggggaattgagagctgcagagagtcagatactgactctaaccctaaccctaaccccaactccaaccccaaccctaatcttgaaggactggtttgacacctaaacccagggtgcctgaaaacaattctgttggatgtttcaatttgctttaaccactttgagctgggtttgcagtgtttgtaactgaaagcatcctaattcaggcaagtgaaagggaaggtgtttcttggtgatgacttactctggtccccttgaatgccaaggaacagaaacccctccgagggaaggcaatttagtacgtgaagactccagagacctgggttctagacccttcttccagggtttccagtcaatcactctccctctcaagccctccagaatgaaaagaatgggtccagattaggccaggcatggtggctcacacttgtaatcccagcacttcaggaggccgaggcaggcagattacctgaggtcgggagttcgagaccagcctggccaacatggtgaaaccacgtctctactaaaaatacaaaagttagccgggtgtggtggtgcatgactgtaatcccagctactcaggaggctgaggcaggagaatcacttgaacctgggaggcagagattgcagtgagctgagatggtgtcactgcactccagcctgggtgacacagcaagactccatctcaaaaaaaaaaaaaaaaaaaaaaaaagaatggctccagattaggtgatctacaagggtgctacccgaagtatctgcagactggggctgcatggtaagtacagcatacacaacacaagcccagaaatttctactttttcagggatgacaacctgacatccctgctccatccgagcttgtgctgaacacaccatcttgctgaaaacggtttagacgagcctagtattatctagccgacaggattagtcacgtgcagcacaacctgtatacagggctgatccagcacagactagaaacattaaatgcttggtctgtttccaggaagttttgagaggcgctgctcagcaagacccttcccctagcgaaggatcgtgaaaacaggacctcccaccatcaacagatgccaatcaaacgttactcattccaggccgggtgcagtggctcacaactgtaatcccagcactttgggaggccgaggcaggtggatcacctgaggtcgcgagtttgagatcagcctggctaacatcgtgaaaccacgtttctattaaaactacaaaacaattagcagggcgtggtggcgcgtgcctgtaatcccaaatcctcgggaggctgaggcacgaaaatcacttgaacccaggaggtggaggctgcagtgagctgagatcacgccactgcacgcctgggcaacagagtgagactctgtctcaaaaaataaaaaaaggttactcattccaggcaacagcagtatacaggggatacagaaagaaacaaagaccggtggctctgccccaacaagcatatggggaggagaaatactaaacaaatattcacatgtgactgctctggtgggaaagtttgggtgtcctgggaatacacactgcagagacccaacatggcatgtgcatggggaagggtgggaggtaaaaaaaaagcctttccagccgggtgccgtcgctcaagtctgtaatcccagcactttgggaggccaaggagggcagatcacctgatgtcaggagttcgagaccagcctggccaacatggcgaaaccccatctctactaaaaatacaaaaattagctgggcatggtggtgggtgcctgtaatcccagctaatagggaagctgaggcaggagaattgcttgaacccaggaagcggagattgcagggagctgagatggtgccactgcactccagcctgggcaacagagagaggctccatctcaaaaaaaaaaacaacaaaaaaacaaaaaacaggctttctgaggaagtgccagagctccaagttctgacctcaaacatgggcagtttaacaaatgtgagctcaaatcctgcctctgtccttctgcacaggtgacctggtgacctgggaccatccctgcactatctatgtgcattccctcttgtgtcaataggggtgtcaggcagctaggaagaccttagcacactgcctggcacgcatgacgctctcaacaaatgcagccactatggtattacagttaagccaggcaaagaggatggagggcaaagagcagctcccacaggggaagcagcaggtgcagcacctgggctggaaggagactggacacagcaaagcaggaagctcctgacagagcactggtgccctgcctggcatccctgtcactgatgctcctgccactttgtgccaaatctcccgcccactggagctctgattcggatctgtacagtgcaactctagggcctggtagtgccttccacgtgggggttaagtaacacatggctgctgagtcaatgtatgaatggatggatcaatggatagacggacagatggtctagtgattgagtgcacaaccgctagagtcagaaaaacccaggttctaatcctgattctcattgattccctatgtggccacaaaaaagttgagccacatctctgaccctcagtttcctgatctgtaaaatgggaaagtgaccattatcttttaagaatggagggagaatgcaacactaacaggaagcacctaactgggtcagcacccaagggcaggcccccaaaaaggggagctgctggagtgtcttcaaaatctcagctcggccaggcgtggtagctcatgcctgtgatcccagcactttgggaggctgaggtgggaggatcgtttgagaccaagagttggacaccagcctggttaacacagcgagatacctatctctacaaaaaacatttagaaaattagccaggcgtggtagtaagtgcctgtagtcccagctacttgggagcctgaggcaagaggatctcttgaacccaggagctcaaggctgcagtgagctatgactgtgccgctgcactccagcctgggcaacagagcaagaccctgtctctaaaagaagaaaacctctgttcctcagggttcccccatccttgggcagtgctccatcatggcatccaccgccttgactgtgacgccgcctcctcaaatggccttcccttccacaccccagcaggagggcaaccccatcaccatcctgtgactccctgcctctgtcacctaacgtcacctctgtcactatctattccctgcttagaaaccatgtgtcccaccccatggtaagttccactctatctgtcttacccctgctgtaccccagcacctagcacagtagccagcatgcgttaggtactcaaatatctggtgaatgaaagaattaatgaatggatacaatagtcatgtacagatccccttaagactccaaatagttacacaatcaaattcagcaggaagtgtaaattctggggcctccagggcccaggcagatgatagacatatgaaggggttagggctgggatgaggcagagtctacaggccccacctcctcagagtccttctcaactacactcaatagatgcaaacagctctcctgaatcttgagttgcagaatgttccaatttttcaagaaaaatcagacatcttaatttttatataaaatctcctgattaaaaatctaatgttggcatctaattttaaaagtggcaggtctgcagcactctgaaagcaacagctatgtgtgaggttgttcattcattcattcacaggcatcggaggacgggtacggcaagaacaaaggatgggacaagccaagctagggcctcttctctgaagtttacagtcatatgtgaggggcagacattagccagatgacagcaaacataacagaacattataacggtaggaagtgatgtgagtgctcacatcagggaggtctggtaggagaaagaaatagatgacagaggtaggcagaaaggctagcacattctcagtcatctcccactcacacacacgctcaattaaagagaaaacttgtggctcacgcctgtaatcccagctcttcgggaggccaaggcagggatcacttgaacccaggagttcgagaccggcctgggcaacgtggagaaaccccatctctacaaaaaatacaaaatttagcctggcatggtggcacacacctgtaatcccagctactaagggggctgaggtggaaggatcactttagctcaggaggtcgagtctgcagtgagccatgatcgcaccactgcactccaacctggacaacagagcaagaccttgtgtcaaaaaaaaaaaaaaaaaaaaaagagaaagaaagaaaacgaaggtagggcttggcgaaacagaactgtcctctgaagtggaccatgcaattccaggatccaattagaccttacctgtgctgggctccctggactcctccccaaagccctgcgtgtccttctttttcctacaaagaggagcagacagtgtccactttcaatgggacatagagtcctcagccccctgacccccagctcagaaggccacaaacactaagtttcagccctggccctgccgcaaacttgctgtgtgacctctgacgttcaatacccttctctgggcccccactgcccggacaatcacagccaggtcagcagccaccgaccgtttacaaagtggcccgacagtgcgggtgcagggcggaaggtccgcggtggggctatttcttgggggatggggcttaagctctccaggaaggtgaacagagggacaaccaaggaacggagagtatgggtttaaggtctctcggggggtggggggcgaggaagataaaccaggctggaggcgtgcccagagggcggatagggcggggcctgcggcttgggggcggggcctgagaagtgcgccgagatcacgcttatgagggcggggctacgggttccccggatggagccgcagtccggccgcgacctactcacagcttaaagttcagcaccgccccggcattcatcagcaacgtcctgcagagggagaattacagttactaggggcgcccccgcgtcctgcctggctctctcttcccagcctctggtccccctaattacccgaacagcaggatgtctccgatcatcgttacggccgaagcgtccgtcagaaccggaagcggaagccccagggagggaggggagaggagcacaagccgaccaatcctaaagcaacagtggcgagggctgggccaatcgaaggtcaaggctgggagggtcccgccctctgcaggccagacccccttaggggagcgcgagcgccccacctcgctggggaggccccgagagccagaatgggaggagcggggtctcctgggggcgggattgggtcacgcgttcgaagcgtgccgcgcatgcgtgaggtctcgatgccgtagggttagctgggcagcaattcctactcactttctggggtcccaaattgggcttctggacaaaaggaatcctttgactcctgagctgcacagggtgcggggtcctgacgcagtggggtccctagaaacgggtgccccaaccaactgggctctaaaatgagatcctcctgggccccatggggaacgggggttcccactgagctgccccccacaagacgtcctgatttgcagagccccaccggagacggggttcctgatcgaacggaccctatggggcagaaaagtcttgacggggctccacagaggaccgaggtcctaacctatctccacggggaacaggggttctgattcatggggtcccaccatggcgtaggggtcctcactgggctccaccgaagatcggggtcctaattgagcccacggggacaaagtcctggccgatccggccccctgggaacgggcgtcccgcgtgggtgggctccgtgagggacgggcccccagaacaggcagctccccagcctccctcgccttgcacgggtgccccgcaccccgcctcgctgggcggaacggggtagcgatggcaggagggtcaacgcctgggacgcccgaccgtccagctgcgtccgtggtgctgggcgtccccaccacctgtcccggggtgggccgtcgcccctcctctcccgcgggggccgggcctggggtggcgcctggcgggcgggggcgggcccagctgcgggggcgcagtcgccgggccgcgggcggcgggacggacgaggccggggccccgggtggcacccggcaggcgggcaggcgggcgccatggagctgctctcggcgctgagcctgggcgaactggcgctcagcttctcgcgggtgccgctcttccccgtcttcgacctcagttacttcatcgtctccatcctctacctcaagtatgagccaggtgagccggggcggggggctggaggggaccggcagcgggtggcgcgggccggggcagctcgggggtcgcagagaggggaagcccgtgcgtggtggagggagcgagggacaggttcaaggattgcatcgtgggagtaggcaggcgctagaatcgtggggttctctcacgccggggtgagcccgggggagaagcccccaggacgatgaagctgggggaggggaaggagaggcgtgcgcgggtttagaggagggggaacaggtgcttggggtcggggctcctggttgggtcagagctgcaggaacttgggcaaggggcgccggctgtggcgagggtgcaggtgggggtcggtgcatctgttctggccgcgcgcaggtgtgacctccctccttgaccttggcacgcggattgagagcgccagcggagtgtctataagggccactgcgctgggggctgcggtcaggttcagcgaaagtgacaccggttctcctccccactgcaactgcccagcaccctccactcccctcccttcccccacggtgctgaatctccgagcccccacgggaattcttccagccctggctccagatcctttccacttacggagcagaaccggccccaaggctgggtgacttggggtcagtgtcctccatctcagctccagactccacgctggggaggtcacaggagggtacagcctgcttcttaatttttaaaatgaggatgaatggcttccttagaacgtgttctatttttataaaaggttcaccgtgaacaaatgtttaaatgtttcttgttcaccgttattctagaacaccagcaacttactagataatagattttaggcttagaaaaataaaggaaccccaaacttcataagcctttctcccacttagatgtaaattaccactatagctcagaaaggaaatagctttattctcagaggataaaaataagcgcccctgtttactaaaaactcaaactgaaaagggcaaaggaaaaaaagagaattactgtcaacatactggtggccagccacctttcttgatgtctcttctattcatttacggctatatagttataaacgtaaatgcacgcttttttttttttttttttttttgcggttttttttttagatggagtttcgctctgtcgcccaggctggagtgcagtggcgtgatctcggctcactgcaacctccaccttccaggttcaagcgattctcctgcctcagccttctgagtagctgggactacaggcacccgccactacacttggctaatttttgtatttttagtagagacaagccttcaccatgttggccaggatagtctcgatctcctgaccttgtgatccacccacctaggcctcccaaagtgctgggattacagacgtgagccactgcacccagccaatgcacgctcttatgctaacaggattacactctatttgctaggaatttttattctatttttgcctatccacatgccagagcctattttcttaaaagctatcctggagaacattactttgcaaaacaaaataggcttttgtgttgtcctagcatgaacatggggctatctttcctttctggggaagaattcttggtggttcaggccagttccttgggcagttgcagaaccttagaaaatctgaaactggctgggcacagtggctcacgcctgtaatcccagcactttgggaggccaagacgggcagatcgcctgaggtcaggagttcgagaccagcctggccaacatggagaaaccccgtctctactgaaaataaaaaaattagccaggcatggtggcacatgcttgtaatcctagctgcttgggaggctgaggcaggagaatcacttgaacctgggaggcggaggttgcagtgagccgagatcacgccattgcactccagcctgggcgacagagcaagactctgtctcgaaaaaaaaaaaaatctgaaactgaggagggttggagccctgtgggaatgtaggacacaaatgtcttgagaaaagaggtctccaagctgcctgggaacttgcaggaaggttcaagatatttctgcagaagtcctagaataagccatccaggctctaagtgccagagcctgaaggttcctgaaggctgagaagtggttccaaaccctggctattcatgaattcatgagacgctcctgggagctttttttcttttcttttttttttttgaaacggagtctcgctctgtcgcccaggctggagtgcggtggcgccgcctctgctcactgcaagctccgcctcctgggttcacaccattctcctgcctcagcctcccaagtagctgggactacaggcgcccaccaccatgcccggctaattttttttttttttgtatttttagtagagacagggtttcaccgtattagccaggatggtctcgatttcctgaccttgtgatccgcctgcctcggcctcccaaagtgctgggattacaggtgtgagccactgcgcccggcctcctaggagcttttaaaccccctatctccaccccccaccaattgaatcagaatattaatctcccctccctcagtgactgatgtctgttatcagggctgaggatactccacccagttcaacctcctcctttcataactggggaaacaggaaatagtggctaagctatcttaaatacacaatgagcctgtggtcccatggctggtcagttgcagcctcgggactcagcccaggtctgcttgactctaagaatcagtacaattgatgtgagattggtttccttagaaaagaaaggtgttggaggccagatgtgatggcttatgcctgtaatcccagcactttgggaggcgaggcgggtggatcacttgagcccaggactttgaaaccagcctgggcaacatgacaaaaccccgtctccactacaaatgcaaaaaaatagccaggtgtggtggcgcacgcctgtaatcccaggtacttgggaggctgagacatgagaatagcttgaatccaggagacggaggttgcagtgagccgaaatctcgctgctgcactccagcctgggtgacagagcctggctgagactctgtcttggaaaaaagaaagaaagaaaagaaaagtgaggtgtcggattgaactgttagtcccagtttggtgtgcgtgctgggtatctgtaaattttcttctcagaatttgtgtgctggaccagctacagaatttgccaggccgatacaaagtatcagtgtggggccttttgttcagaaattaagaatttcatagccaggcatggtggtgtgtgtctgtggtcccagctacttgggaagctgaggctggaggatcacttgagcccaggagttggagctcaactgcgcctggctgggtcaggctttcttgagaatcctgagaatggatgaagctcagagtgtggtcctcaacagagcagcatcaatgttgcctgggagctgcagcgagctatgatcaccccaccgccctccagcctgggcaacagagcaagaccgtgtctcctaaaaaaataataataataataaaaaaagaatgtcagcataggtcagataatctcagcatttggggaggtcaaggttggaagattgcttgaggccaggagttcatggccagcctgggcaacattgtgaaaccccttctctataaaaaatacaaaaatggctaggcgcggtgtctcatgcctgtaatccgagcactttgggaggctgaggtgggcagatcacctgaggtcgggagttcaagaccagcctgacctacatggagaaaccctgtctctactaaaaatacaaaattagccggacgtggtggcacatgcctgtaatcccagctactagggaggctgaggcaggagaatcgcttgaacctgggaggcagaggttgcggtgagccaagattgtgccattccactccagcctgggcaacaagaatgaaactccgtctcaataaacaaataaataaaaattaaaaaatgcaaaatacaaaaatattagccaggtgtggtggcatgtgcctgtagtcctagctactagggaagctgaggtcggaggattacctgaaccctgcaaggtggaggctgcagtgagccatgatcgtgccactgcactccagcctgggcaacagagtgagaccctgtctcaaaaaaaaaagaaaaaagaaactaaacgtctctgaatcatgggagtcagttctaccactagcactgagtaaacaccacaatggttatttcaccaccatgagcttcagtttatttgtctgtgaaatgggatcattggtaagagaaccccagactccctttcctagcgattgtaaagatctattgagaattttgtcagggataaggtctaaggcatttgtgaggggtggtgatgtttatttggaagtctagggaggaatatattacttgggatactggcattttctgggtcaggcttgcttacttttctgtttcttttcttttccttttttttttttttgagatgcagtcttgttttgctgcccaggctggagtgcagtggcacgatctcagctcactgcaaccttcacctcccagattcaagtgattctcctgccttagcctcctaagtacctgggattacaagcatccaccaccacacccagctaatttttttgttttgttttgtttttggagacggagtcttgccgtgtctctaggctggagtgcagtggctcgatcccggctcactgcaacctccacctgccgggttcaagcgattctcctgcctcagcctcccgagaagctgggattacagacacgcgccaccatgcccagctaatttttgtatttttagtagaaacggggtttcaccacgttggccaggatggtttcaatctcttgacctcgtgatccgcccaccttggcctcccaaagtgctgggattacagacatcagccattgcgcctggcccattttttttgtatttttagtagagatgagttttcaccatgttggtcagggtggtctcaaattcctgaactcaagtaatccacccgcctcagcctcccaaagtgctgaaattacaggtgtgagccactgctcttggccaatttaactttaaaaaaatttttttttttcgagacagggtcttgctctgtctcccaggctggagtgcagtagtacagtcatagctcactgtggcctccaactcctgggctcaagcaatcctcccacctcagcttcccatgagcaactgtgcctggctgggtgaggctttcttgagaatcctgagaaagaatgaagctcagagtgtggtcctcaactgagcagtgtcaatgtcacctggaagctgattagaaatgcagagcccctgcggtggctcatgcctatagtcccagcactttgggaagccaaggtggctggatcacaaagtcaggagtttgagatcagccaggccaacatggtgaaaccccgtctctactaaaaatacaaaaactagccaggcatggtggcgggctcctgtaatcccagctacttgggtggctgaggaaggagaatcgcttgaaaccagaagatggaggttgcagtgagctgagatcgcaccactgcactccagcctgggcaaaagagcgaaactccatctcaaaaaaaaaaaaaagaaaagaaatgcagagttctggccaagctcagtggctcacacttgtaatcctaacactttgggaggccgaggcgggcggatcacccgaggtcagaagttcgagaccagcctggccaacatggcgaaaccctgtctcttctaaaaatacaaaaattagccagtcatggtggcacacgcctgtaatcccagctgctcaggaggctgaggcaggagaatcacttgaaccagggaggtggaggttgcagtgagccgagattgcgccattgcactccagcctgggcaacaagagccaagagtgaaactccatttcaggaaaaaaaaaaagagaaagaaatgcagaacccaggccccacccagctctgcccaatgagagtctgtatttgagcaaaatctgcgggtgatttggctcatttctggggcctccaagctccatgtgaggaaagagaaggaagcagttgagtgctggctgcaaaactgaagaaatgagtgaatcaatgacaatcctggttgccttgagccttgacccatccaaagaatctctcagaccagtacttctcaaactcacctacacaccagactcacctagggagattttaaaaatccttttgggccagacgtggtggctcatgcctgtaatcccagcactttgggaggccaaggcgggtggatcacttgaggtcaggatcgagaccagcccggccaacatggtgaaagcccgtctctactaagaaaaaatacaaaaattagccacgcatggtggtgtgcacctgtaatcccagctacttgggaggctgaggcacaagtattgcttgaacgcgggaggtggaggtttgcattgagccaagatcttgccactgcactccagtctgggtgacagagcaagactccgtctcagaaaaaaaaaaaaaaaaatccttttgtcctgattgtcacccctctttcatttaaatcagaattgtgggtcaggcatggtggctcacgcctgtaatcccagcactttgggaggctgaggctggtggatcacctgaagtcagaagtttgagaccagcctgaccaacatggtgaaaccctgtctctactaaaaatacaaaaattagccaggcgtgatggcgggcgcctgtagtcctggctacttggtaggtcgaggtgggagaatcacttaaacctgcgaggcggaggttgcagtgagcagagatcatgccattgcactccaacctgggcaacagagcaagactctgtctcagaaaaataaataataaataataaattaattaaataaataactcagaatcatggggctgaaggaggtggctcacatctgtaatcccagcaagttgggacaccaaggcaggcagatcacttgaagccaggcgttggagaccagcctggccaacacagtgaaaccctgtctctactaaaaatataaaaattagtcaggcatggtggcgcaagcctgtaatgccagctactccggaggctgaggcacgagaattgcttgaacctggggggaggcggaggttgcagtgactctgtctcaaaaaaaaaaaaaaaaaaaagagatgggggttctgttgtgttgcccagggtggtcttgaactcctgggctcaggagatccacctgccttggcttcccaaagtgttgggattacagacatgagccactgcacccggccaaccactgatctttctttctactacctccagagttttgccttttccagaatgtcctttagttggaatcatgcagtatgtacccctttcagactggcttctttcacttaggaatatgcatttaaggttcctccatgtcttttcatgtcttgatagctcactggataatatttctttcttttttctttttctttcttttttttttttttgaaatggactttgctcttgttacccaggctggagtgcaatggtttgatcttggctcactgcaacctctgcctcccaggttcaagtgattctcctgtgtcagcctcctaagcagctaggattacaagcatgtgccaccacgcctggctaattttttgtatttttagtagagatggggtttctccatgttggccaggctggtctcgaactcccgacctcaggtgatctgcccgccttggcctcccaaagtgttgggattacaggcgtgagccactgcacccggccaaatagtatttcatagtaaggatgtttcatggtttgtttatccactcactccctgcaggacatcttggttgcagttttaactttttttttttttttttgagacggagtcactctgttgccaggctggagtgcagtggtgtgatctcggctcactgcaacctccggctcactggttcaagcaattctcctgcctcagcctcctgagtagctaggattacaggtgcccgccaccatgcccagctaatttttgtgtttttagtagagacagggtttcaccatgttggccaggctagtcttgaactcctgacctcaagtgatccacccgcctcagcctcccaaagtgctgggattacaggtgtgagccaccacacccagacaagttttaacatttttcatatgctgttaggaccaaagaaaaccattctttgatccctgatttgagatctctggtttgaactacaagctttttgagggcaggaggctgttgactcctgctccaccttgtgagggagaggctgctatctccatttaacaggggaggaaactgaggcagaatgctgagctcaaaagctcaggaggagaagactggtcctagagtcactgagagactcggtcagtaccccatgcttcatacacctctgactgaatagcacagtgctagagtgccctggggacccttctagtaccacccagtcatctgcaaatgaggcattgacccctgaaaagggaaagtcacagagtccattgcagaccaggacttagggacccaaagctttttcctctcttctgaggcagagctgatttttttctgtttgtttatttatttatttatttttattttattattttatttttttgagacagagtttcgctattatcgcccaggttggagtgcagtggcgcgatctcagctcaccgcaacctccgcctcatgggttcaagcgattctcctgcctcagcctcccgagtagctgggactacaggtgcctgtcaccacgcccagctgatttttgtatttttaatagagatggggtttcattctattggccaggctgatctcgaattcctgaccttgtgatccacccgcctcggtctcccaaagtgctgggattacaggcatcagccactgcgcccggcctgttttttgtttttttttttttttgagacagagttttgctcctatttcccaggttggagtgcagtggcatgatctcgactcactgcaacctccgcctcccaggttcaagcgattctcctgcctcagctgccggagtagctgggattacaggcatgagctaccgtgcccagccgaggcagagctgatttttaaaaaatccatctactgaaatttccacccacaggtactttccatttccgcactgttccagaaatacctcttgcgtcgttgctaggcgctaagcaatctctttttcaccctcacaggcatctttggaaatgactgatatagatctggtgtggtcaccttgtccaggctttcccaagatgagcatcgaaagtcccatgtccagccgggtgcgggggctcatgcctgtaatcccagcactctgggaggccgaggaaggtggatcacctgaggtcaggagtttgagaccagcctggccaacatggagaaatcccatctctactaaaaatacaaaagttagccgggcctggtggcgggtgcctgtaatcccaggtactcgggaggctgaggcaggagaatcacttgaacccgggaggtggaggttgcatcaagccaagatcgcaccactacactccagcctgggcgacagagcaagaccccatctcaaaaaaagaataaaagaaagtcccatgtcccaggaaacccctgggacccaggcaaagggggatagttggtcaccctagaccgcctccccctcctacatatgggcaaactgaggcccagggaagggagggactagcctaagctcacccagtcagaggggaatgtgttcatggcatgcggcagttgaaaacctattggcttcatggggctgtcccaaacccatcaagagaaaccaaggagtatggaaaggggaaaggacctgggcttttttttttttttttttttttgaggcggagtctcactctgtcactcaggctggagtgcagtggcacgatcttggctcactgcaatttccgcctcctgggttcaagcaattctgcctcagcctcctgagtagctgggattatagccatccgccaccatacccagctaatttttgtatttttagtggagacggggtttcaccatgttggccaggctggtctcaaactcaaactcctgacctcaagtgatccacctgcctcggcctcccagaatgctgggattacaggtgtgagccactgcgcctggccgtcatcttggtcttttgacagtgaagcaaactaaggcttgggggggcaggcagtcacttgcccaaggccatgctagagtgagtagcagagccagaagctaggcatgtgatgaggttttgccatgttgcccaggctggtcttgaactcctgagctcaagtgatctgcctgccttggcctccgaaagtgctgggattacgggtgtgagccaccgcgcccagccggcatgtgacttttatagcagggcacacacatactgcaaacatgggcatctgcccgtcagagcgtaactcatgcaaacgctaggtccctacccccactccccaacctcggtccctgggatgatcccagagggcacaagaaagatcctggaaagaattcagtccctgggagttatttttagatgcagaggtatccatttctgcaaaacatgggtgcctcacccgacctggcctctgcacaggccaccagctgctctgagggattaactctcagccagttgtgttttaaatagaccctaggagaggagctgaagcattttacctcataccctaggaccttggtcaatggtaagacgtaggacaaccttgagagcagggagaagctgcattttgggctcataactccagggtgaggttagaggagggaaaagctcattccagtcctcatcaggagttagacaaagaagcaacgttctactttgttttttaaaaaaagagatgtggagagaaaaaagtggcttgttcaagatcacattgttagttggtggggatagcgaggagaggggcaagtgtattgattacttactctaaaacagggatgtccaatcttttggcttccctgggccatgtttgatgaagaattatcttgggcctcacataaaatacactcacactaacgatagctgatgagcttaaaaaaaaatcacaaaaaaacctcattttttttttttttttttttgaggcagagtcttgctctgtggcccaggctggagtgcagtggtgtgaccttggctcactgcaacctccacctcctgaattcaagtgattctcatgtctcagcttcccaagtagctgagattacaggcgcatgccaccacgcccggctactttttgtatttttagtagagatgggggtttcaccatgttggctaggctggtctcgaactcctgacctcaagtgatccacctgccttggcctcccaaagtgttgagattacaggtgtgagccactgagcccggccataagtgtatcattttgcagcccaaccttttcactcagcagtaagcttatgggacttgtctttgttgatacatctaaaacagagattctcaaccagaagggattctgttcccaaaggataaatttggcaatatctggagacattcttggttgtcacagctgtgtggtgccactgtcatctagtgggtggaagccagggatgctgcttaacatgctataatgcacagaatgcccccatagcaaaaaatgatctgatcccaaatgtcaacagagctgaggttgaaaaaccctgatcaaggtctagttcacttttctttttctttttgtttgtttgtttgtttgtttgtttctgagatggagcctccctctgtcgcccaggctggagtgcagtggcgcaatcttggctcactgcaacctccacctcccgggttcaagcgattctcctacctcagccccctgagtagctgggattacaggcacctgccaccatgcctggctaatttttgtatttttagtaaagacagcgtttcaccatgtcggccaggctggtctcaaactcctgacctcaagtgatccgcctgccttggcctcccaaagtgctgggtgagccactgcacccagcctggttcacttttaaatagctactctatggcactccacattttgtggcttcccacagctttactaagagactgttgatttcacttttctcctgttgcaacattgtatcagtgaaacatcttccttctctaagtctttgtttatggtgcttgtttctttggggttaatagcaaggagtggaattgctggggtccaggggatgcacagcttcatatttccctggtattgccaagttgcctctaacatggtaatgcccactgatgcgctcacctggatttgtaggagaaactctggcattgatgattatttccccctgtgaggttgaccaagctaagaagaacgtaattccttttacagagtagagtgcactacacctttctcaattaataaatggaacagagaaggtcattgttgttacaatgtcaccagaaatgcgcaggcctgctggtggctcacacctgaaatcccagcactttgggaggccaaggcaggaggatcatttgaagccaggagttcaagagcagcctgggccacacagtgagatcctatctttacaaaaaaagaaaaaaaaaaaagtataaaaattggccaggcatggtggcacacgtctgtactcctagctacttggaaggctcaagcccaggagtttgaggctgcagtgagctatgattgcatcactgcactccagcctgggtgacagagcgagatgctgtctcttaaaaaaagtgtccagggccaggcgctgtggttcatgcctgtaatcccagcactttgggaggccaaggtgggtggatcacctgaggtcaggagttcgagaccagtttggccaacttggagaaaccccctgtctactaaaactacaaaacttagctaggcgtggtggcaggtgcctgtaatcccagctacttgggaggctgaggcaggagaatcacttgaacctaggaggaggcggagattgcagtgagccgagatcacaccactgcactccagcctgggcgacagagcaaaactcttgtctccaaaaaaaaaaaaaaaaaaagttggggggatccaacacaaccatgatgactttatgtttgctagaatgtaaattccatgagggcagggacctcacctgtcttgttcattattgtaataccaggacccaaggccgggcgccgtggctcacacctataatcccagcactttgggaggctgaggtgggcagatcacctgaggtcgggagtttgagaccagcctgaccaacatggagaaaacttgtctctactaaaaatacaaaattagccgggcgtggtggtccatgcctgtaatcctagctagtcgggaggctgaggcaggaggattgcttaaacccaggaggcagaggttgcagtgagccaagatcgcgccattgaactccagcctgcgcaacaagagcgaaacaccgtctcaaacaaacaacaacaacaaaaaaaaaccaggacccagagggatgcacatttcccataaattcattcacagttatttcttgaacccatacaatgtgtccaacacagcccccattcagtggcagagaaggcctccgtggttgctgaactcacggagggatgaagatcaaatccacccgttgaatgtatcattagtatatacagatttcttaatctgttgcagatgctataatctgttgcagtggcaataaaccagtagaccaggtggctgataaacaacaaatttatttctcagagttctggaggctggaagtctgagatcagggcactaacatggtcaagttctaatgagggccctcttctggcttgcagatgatcaacctctccttgtgtcctcatatggtagacagcagagagcagcaggctttctcatgactcttatttgtttatttattgagatagagtcttgctctgtcacccaggctggagtgcagtgccttgatcacggctcactgcagcctcaaccttccaggctcaagtggtcctcccacctcagaagtagctgggaatacagacacctgccatcacgcccagctaatttttattgttgttgttgttttagagatgagatttcactatgttcccagggctggtctggaactcctaggctcaagagatcctctggcctcagcctcccaaagtgctgggattacaggtgtgagtcaccacgcctggcctctcttgactatttttttttttttttttttttagagacagagtctcactctgtcgcccaggctggagtgcaatggtgcaatctcagctcactgcaacctctgcctcccgggttgaagcgattctcctacctctgcctccctagtagctgggactacaggcgcctcccgcaacgcccagctaatttttgtatttctagtagagacagggtttcaccatattggccaggctggtctcgaactcctgaccttgtcatctgcccgcctcagcctcccaaagtgctgggatgacaggcgtgagccaccatttataaaggctctaaccccgttcgtgaggggtctaccctggtgacataatcacctcccaaaggcccgacctcctaatgctatcacaagcggggaggggtaggatttcaacatacgaattttggagagacagaaacattctgtccacaacagacactctttctcttccctgctaaaaatagacaaaactgattatttcttttgcttagtcttttgatttgactaataagagatcacattttggccgggcgcggtggctcacacctgtaatcccagcactttgtgaggccgaggcaggcggatcacgaggtcaggagattgagaccatcttggctaacacagtgaaaccccgtctctactaaaattacaaaaaattgggcgtgctggcgggtgcctgtagtcccagctactagggaggctgaggcaggagaatggcatgaacctgtgaggcggagcttgcagtgatctgagattgcgccactgcactccagcctgcgggacagagcgagactccatctcaaacaaaaaaagagagagattacattttgtgaccttgttatctcatgtcaatactgactgtagttttcatttcattagaataagttgtattaggggaatcgttggttttggctctggtcatgtaatgtacagagtagctgtaccttacaacttgatcataaagttgttctctgcaaaacgaaactagttgggaaagacagaatcaatatgatgaaagaagtggtcataccaggagacacaagttctaactccaaggtgtggccttagaagattacgaagatacaacataaggatagaactatttataaagattataaaggctttacatgagtaatacaagatgcaaggatttagtgaatagacattaatactgtaccccgagtgttgcattttcatgacctttttttttttttttttttttgagaggtagtctcgctgttgttggcctgggctggagggcaatggcacgatctcagctcactgcaacctctgcctcctaggttccagcaattctcttgactcagcctcccgagtagctgagattaaaggcgcccaccaccacgcctggctaatttttgtatttttagtagagatgaggtttcaccatgttggccaggctggtcttgaactcctgacctcaggtgatccacccacctcgccctcccaaagtgctgggattacaggcatgagccaccgtgcccagccctttttttaaaaagaaaaaaaaaaaaaaagcccagctataggacctaaggactcagcaatggggttttcaagcccccttctttttaatatggaattttaaaatacttcttatcttggaagagtttatgactcacaagaagttgcaaaaatggtacagagaatttgcaaataccctttacccagcttcctccaatgacatcttatgtaatgatagtgcattattaaaaccaggaaattggcatgggtacactatcattaactcaactacagactttatatatttattatttttgagacagagtctcattctgtcacccaggctggagtgcagtggtgcactcatggcttactgcagcctcaaactcttgggttcaagtgatcctcccaactcaacctcttgagtagctgggactacaggtgcatgccaccatgcccagctaattagaaaaaattttttgtagagatggggtctcactgtgttgcccaggctggcctcccctccccttccctcccttcccctcccctctcaacagggtcttgctctggagtgcagtggcatgctcatgactcactgcagcctccacctcaccagctcaagtgatcttcctacctcagcttcccgagtagctgggactacagaagcatgccaccacgcccagctaatttttaaaattttttgcagaggtggggtctcactatgttgcccatgttggtctcgaacacccaggctcaagtgatctacgtggctcagcctcccagagtgttgggattacaagtgtgagccaccgtgcccagcccggaaataaaagcttaatacatgctacaatggggatgaagcttgaggacattatgctcaataagccacacaaaacaacaaagtttgtatggtttcgcttacatgagattcctaaagtcatcaatttcatagagacagaaagtagaatggtgccaggggctaggcgatgggggatgaggagtgagtgtttaataggtttcagtttgggaagatgaaagagttttggagatggttggtggtgattatggcaaaacaatgtgaatataatgccatagaaccacacacttggccagccacttggcagtggctcatgcctgtaatcccagcactttgggaggccaaggtgggcagatcacaaggtcaagagattgagactatcctggccaacatggtgaacccccatctccactaaaaatacaaaaattagttgggcgtggtggcgcatgcctgtaatcccagctactcgggtggctgaggcaggagaatcacttgaacccgggaggaggaggttgcagtgagccgagatcgcgccaccgcgctccagcctggtgacagagtgagactctgtctcaaaaaaaaaaaaaaaaaaaaagagctatacacttaaaaatgtttaaaatgggctgggcatggtgtctcacgtctataatcccaactctttgggaagctgagccaggtggatggcttgagcccaggagtttgagaccagcctgggcaacatggcgaaaccccgtgcctactttaaatatacaaaaaattagcctggcatggtggcgcgcgtgcctgtagtcccaaatactttcgaggctgaggtgggaggagtgtttgagcccaggaagtcaaggctgcagtgagtcgtgattgcaccactgcgctccaggctgggtgatgggagtgaaaccctgtgtccaaaaaaaaaaaaaaaaaaaaaaagtaaagtgataaatttaatgtatattttacaaaaaaaaattctttttaagacagcaggtgtaagaataccagcataaggctgggcacggtgactcatgcctgtaatcccagcactttgggaggctgaggtgggaggttcacttgagtccaagagttggagaccagcttggccaacatggtgaaaccccttctctactgaaaatacaaaaattagccaggcatggtggtggctgcctgtgatcccagctactcgggagtctgaggcaggaggatcgcttgaacctgggaggcagaatttgcaatgagctgagattgcaccattgcactccagcctgggtgacagagtgacactctgtttgaaacaaacaaaaaaagttaaaaaaaaaaaaaaaaaagaataccagcataagctcatagggatcttgggatcagctgaggtcagaatagcaatttcttttgtttcgtgtgtgtgtgtgtgtgtgtgtgtgtgtgtgtgtgtgtgtgtgtgtatgtgtgtgttttagatggagtcttgctctgttgcccaggctggagtgcagtgcagtggtgcaatctcagctcactgcagcctccacctcctgagttcaagtgattctcctgtcagcctcctgagtagctgggattacaggcatgcactaccgttcccggctaatttttgtatttttagggacggggtttcaccatgttagccaggctggtcttgaactcctgacctcaagtgatttgtccaccttggactcccaaagtgctgggattacaggtgtgagccaccatgcccggcccagagtagcaatttcaaagtactcccaggtacaagctggcccgtctcaccaagcctcagtctcctcttgacaatgagactcctgataataaaagccatcacttggctgggacactgatgaggatttattaagtcctaaatgtgaactagtgtcatcatcattgccacctctctgggcatgaaggaaaggactcccactcggctctctattttctctgtgcaacctcaggcatgcgtacagcctctctgaaccttggttcctcctctgaaacttacaaactgcacagtgttgggtgggcgctctggattaggataggctgaccagagcatatgggagtgaagcctgcccttggcatgctggtgatgatgggggacactcctgtgcctcccaggagcagtcgaactgtcccggcgccaccccatcgcgtcctggctgtgcgccatgctgcattgcttcgggagctacatcctggctgatctgctccttggggagccactgatcgattacttcagcaacaactccagcatcctgctggcctcagctgtctggtaagccatgctgggcatgggagagcagagccgggtgggggaaacaacaacctgggcaccagggaggagagaggttggaggaattagaatgcaccagcaacagccctcatgatggccctgaatatgctgccctccatgcccatctctggtctaggcacagcacgttggggagggtggtctgatataaccacagctccctacccccatccttcacagtctgcccatcccctggcactcactgttctctccccaaaaggtacttgattttcttctgccccctggacctcttctacaagtgtgtctgcttcctgcctgtgaaactcatcttcgtggccatgaaggaggtggtgcgagtccgcaagatcgcggtgggcatccatcacgcccatcaccactaccaccacgggtggttcgtcatgattgcaactgggtgggtcaaaggtaaataggatgatgacaatgaaaaatcatcccagtggagaacttttggttcagtggtactaccaggcaccccagctaggaaagccattgctccaggcacaggggcataaagactgcagtaggtgttcaaacctccctacaggtatcagccgatacctttagggtaaatgggaagattcttctagaaatgttactgtcaggggtacctaagacagtgatgatgatgacaaaagccagcattgccagagcaggttttctcacttgcagcactactgacatgtggggctggatcattctttgtggtgggggctgccttgtgcactataggatgttgaacagcacccctggcctccacccacgagatgccagtagcacacttgtccccagctgtgacaaagaaattgtctccagacattgctaaacgcctcctagagggcaaaatggctgcaggtgagaaccccttcttctctagagctctagctataggagttcttaacttttgtggaccatggcccttttgccagtgaagcctacagaccctttcgtgtgcagaaaatagagctagacatggtggctcatgcctgtagttctagctactcaggaggctgaggtgggaggatcacttcagcctaggagttcaacattacagtgagctatgattgtgccactgcactccagctgggcaacagagcaagagtctgtctctaaaaaattaaaattaaaaaataaagtaataatgaaaatgttattagaaataaagaacgttttataatgataaaagggtcaatccaccaggaagatataacaactataaacatatatgcacctagaaacagagcaccaaaatacataaagcaaaaatggacagaagttaggggagaaagagataattcaacattaaaagttggagaagtgggccaaggagtaacaggaaagcagggaaagaaggcctgagcaagtgccaaaaaccattgggcactttatcctcgcttcctgcccaccagatatgggtacccacaaagtgccaagacctagaatcaccctccattgagccatggtgtcctcagttattccttgctatggggagccaacctgtgcattatacaatggtgagccacctccctggcctcgactcactaaataccagtagcgctccctccccagctgtgacaactcaaagtgtttctcaacattgccagatgcttccttgggggcaaaatggccccagatgcgattccctggtccagtagtacatctcaggcacccagttggtgcagcagttcctggagtggatgtccaagtctatttaaccagtacatttagggtaaatgggaagattcttccagaaatttaatcattctatctccatttgagtcttcttattgtctctccaggaagcttttagtactgagcagattccccaggggtatagcatctcctccagaggatgggtggcttgagaaagattaagaacttggagccttgaggaggagagagactgcgggtgggggctgccttggaagcctcatacacagcttggggtcctggattaggggcatcaggacagacaaccccaggttgaagacctgccttgcaggtggggacatgactgattcctttaggtggcttttgctctgaatttgccatatgatcctcagcaaggctctgtcctctctgagcctcagtttccccacctgcagctgatgatcatacacccccaggctcagtgtccttctagagaagattctgggagtggagagactgcttccttgggaattcaaacaagaggaaaggagacctgggggtggtgggcttgttcagaagcaccctgtcctgtaggttctggtgtcgccctcatgtccaactttgagcagctgctccgaggggtctggaagccagagaccaacgagatcctgcacatgtctttgtgagtatcccactccacctctccctccatgcctcctgtatgtccgggtgcctgaccctgagttggatgctgctgataacttagagaggcctcaacccttgactctgcctttcaggagctttcagaggctatgactggggaagctcaaagcagagccatagctctgctcagtgtggaggttggggagggcagagctgcaggaaggaggcaatacctgattggggttttgaagggtgagcaggagttcactggccaagaaggagcctcccaacagaggccagcatctctgccaactgtgaaatcacagaagagcagcagtgctgctgggtgtgcggggtcagggtacagggtatgcatgggatatggagtgtgcattgggagcatatctggagctaagtggacaaggccaggtgacagcatccaagacccaatgcaggatcccacactgcatttagcttaatgttttttatttttttattttttgagacagagtcttgctctgtcgcccaggcttgagtatgctggcatgatctcggctcactgcaacctccacctcccaggttcaagagattctcgtgcctcagcctcctgagtacctgggattacaggcatgtgccaccatgcccggctaatttttgtattttgagtagagatggggtttcaccatgttggtcaggctggtctggaactcctgacctcaagtgatctgccgacctcagcctcccaaaataccgggattacaggcatgagccaccctgccctggacagtttagtgcatttttaaaagaccttgttgggggctgggtgtggtggctcacacctgtaatctctgcactttgggaggccaagcctggaggtttgcttgagtccaggagttcaagacaagactgggcaacatagtgagacctattctatattaaaaaaaaaaagttaaattagctaggcatggtgggatgcacttgtggtcccagctactcaggaggctgaggcaagaggattacttgagcccaggaattcgaggcttcagtaagctaggatcatgccactgtactccagcttgggtggcagagcaagaccttgtctcaaaaaaaaaaaaaaaaaaagggatcatgcatttaaatcacctggccctggaacctggtgagtgctttggaaatattagagagaattatcatcattaggctgggcacggtggctcacgcctgtaatcccagcactttgggaggctgaggtgggcagatcacctgaggtcggcagtttgagaccagcctgaccaacatagagaaaccccatttctgctaaaaatacaaaattagctgggtgtggtggtgcatgcctgtaatcccagctacttgggaggctgaggcaggagaaccacttgaatctgggaggcggaggttgcagtgagccgagatcacgctattgcactccagcctgggcagcaagagcgaaattccatctcaaaaaaaaaaaattaactaggggtggtggcatgcctgtagtcccagctacatgggaggctgaggcaggagaaccggttgaacccgggaggcagaggttgctgtgatccgagatcctgccactgcacttcagcctgggcaatagagcaagactctgtctcaaagaaagaaacagagagagagagagagagaggaaggaaggattattaaatacatgcagtgaagctgggcatggtggcccacccctgtaatcccagctattcaggaagctgaggtagggggattgcttgaaaccaggaattcaagaccagcctgggcaacattacaacatcccatctctaaaaaaaaaaagaaaaaaaaaattagccaggtgtggtggtgtgtgcctgtagtcccagctactcaggacgctgaggcaggaagatcgcttggtctcagaaggttgaagctggagtgagctgtgatcacacaagtgtactccagcctgggcaacagagcgagaccttgtctcaaaaaaaaaaaagcaatgagagacagacatcaggaatagaagtcacaggtctgtcttttgcaacaaataaaaatatcttaaacctattttgcaaggaaaaaaataaaagttaaggaaaactctgcatgttgtaatcacattttctgggggaaataagctgatgggggatccccaagatcatcctgatgttccatgatttgctagaaggactcagagaacttagcaaagccattatattcagggttatgatttattacagtgacaagatatagaataaaatcagcagaggcagctcacacctgtaatcccagcactgtgggaggccgagataggaggattgctcaaggccaggagttcaagaccagcctatgcaatagaacaagactccatctctacaaaaaaaaaaaaaaaacttaaaaattaagcaggcacagtggcacataactctagccctagctacttggggggctgaggtgggagaatcacttgagcctcagagtttgaagttacagtgagccatgatcagaccactgcactccagcctgggtgatagagagagaccctgtctctgtaaataaataaataaataaataaataaataaataaaacgaaatcagcaggggttggctgggcgtggtagctcatgcctgtaatcccagcactttgggaggctgaggcgggtggattatttgaggtcaggagttcaaaaccagcccggccgacatggcgaaaccccatctctagtaaaaatacaaaaatcagctggcgtggtggcgggcatctgtaatcccagctactcgggaggctgaggcaggaaaatcacttgaacccaggaggtggaggttgcagggagctgagatcatgccactgcattccagcctgggtgacagaatgagactctgactcatacacaaacaagaaatcagcaggggcaaaatgtgcatgaggcagagtacaggaaagaaaaggtgaaaatatccagttttcctctcccagtggaatcatgtggacagggcttcattctcccagcagcaatgtgtgacaacatgcatggtgtactgccaaccagggaagctcttctgagcctgggtatccaggatttttattgtggctcagaactagctaaccacctgtgtggctgacctcagtcttcagcccctctagaggtccacctgatgctgcatggcccaagacccccaccataaattacgttgttactacctggtgtggcccaaggccgtcctcaggcaaacaaagacagtcttatcaaggcaggacactccaagggcttagagggcatattccaggagctggacaaaggccagatctttccttggaccaggttaacccatcatgcataggatgacaccatctcaacctgccaccttacaatcaggagaagctgtggctgggcgcagtggctcatgcctataatcccagcactttgggaggccgagcagatcacttgaggccaggagttcgagaccaacctggccaacatggtgaaacactgtctctcctaaaaatacaaaaattagccaggcatggtggcatatgcctgtaatcccagctacttgggaggctgaggtgggagaaacacttgaaacaaggaggtggaggttgcagtgagccgaggttgtgccactgcactccagcctgggcaacagagtgagattccatctcaaaaggaaaagaaaagagagaagctgggatgggagctggtgccagggcaggggggtgtctgggccagagttatgaagacttgagccatgcaggcacctcccggtaatgacagctgctccctccagccccaccaaggccagcctgtatggagccatcctcttcaccctccagcagacccgctggctcccagtgtccaaagccagcctcatcttcatcttcaccttgttcatggtgtcctgtaaggtaagcctttctcttcttgcagcattcttgccttgaccaatgccaccctgccacctccaggttgggagtggggaaattggacactcccagccttatgtggctgggacaggcagcccagagaggggagatgcttgccagtaggtcactgggaagagagtttaaaaggcagtgtccagcagccaggacacagatgagaggaacaggccttctgtgtaaaggacccagcctgagccagggtcaaggtgggcccactctcttgggtacagagaccagagggacaagaagctgaaatggcagcatcaggtacccaggaactcagttggaccaggaatacttctagtctgacagtcatgccttgagttgacatcaccccacccaggaggggtcttcaggggctgggctctctccctctgcatgaagatcttagctcagggctgtgtcttccctgggtgaggactccagggctgtcaaaagggagtgagcatgtcttcctgcattaggcgagaagggagaggcaagcagatggctgggatcctgtcctgctatgtttgtagctctaccccaggccaaatgtcttagtccattcaggctgctgtataacagaatgcagtaccatagactgggtggcttagaaacaacagaaatttattcctgggcaggcacgggggctcatgccaacacttcagggggccaaggcaggcagatcacttgaggccaggagttcaagaccagcctgggcaacatggcgaaaccccatctctcctaaaaatacaaaaattagccaggcgtggggtcacatgcctgtaatcccagctactcgggaggctgaggcaggagaatcgcttgaacccgggaggtggaggttgcagtgagctaagatcgcaccaccgcactccagcctgggcaacaaattgagactctgtctcaaaaacaaacaaacaggcaaacaaaatacaaatacaaaaattaaccaggcgtggtggcgcatgcctgtaatcccagctacttggatggctgaggcatgagaattgcttgaacccaggaggtggaggctgcagtgacctgagatcatgccattgcactccagtttgggcaacagagtgagaccctgtctccaaaaaaaggaaaaggaagaaatgtatttcttacagttctggaggctgggaagtccaagatcagggtactagcctggtcgggttctggtgagggccctctttactggttgcagataggcagcatctcactgtgtcctcgcatggtggaagggactggttagctctcctgggcctctttataagggcactaatgtctttcctgagggctccacccttatgatctaattacccctccaaaggccttacctcctaataccatcacctttgtgataggtttcaacatatgaatttgggaggacacagaccttcagacctgcacttagcacagcttttctctgagcccaggtgtcgtggggaattctgggggatgggtgaccagcagtctcagtgtgcttggaactttccaggggtcaacacttgaaatctggcatcctgggaaacctgagatggtcgcccatcatcctgggggtgcatgcagccagagggctgggtctgggctacctccaaccttgactttgatgacattctctcccctcttctccccaccctgccctccactcctttgctttctaccttggtctccctctgtctctcttgctgtctccctggccaccccacctcaggtgtttctgacagccacccactcacacagctccccctttgatgccctggagggctacatctgccccgtgctgtttggttcggcctgcgggggtgaccatcaccacgacaaccatggtgggtcccacagcggtggtgggccaggagctcagcattcggccatgcccgccaagtccaaggaggagttgagcgagggctccaggaagaagaaggccaagaaggcggattagggggtggcccaaggggcaccggggagaggacccggacccaggaccctctgagctgggaggcttcctgcgctcagatctatcctttcctggccttgacttccccatctgcaaatcagggtcattggctcaccctccagggctgatgtgggggttgagatatggggatgaggatgaagaacttttgtagaaatcggggttccctctttctctctgccaggaccccatagagtcacagcttttggaggggttcacagaatcctggcagcagctccagtcaagaatgtcactggttggcatgatattcttagttgtatttttccttctttaaaattgcatcttgaccaggcacagtggctcatgcctataatcctagcactttgggaggccgaggcgggcagatcacctgaggtcaggagttcaagaccagcttggccaacatggtgaaaccccatctctaccaaaaatacaaaaattagccagacgtggtggtgcacgcctttaatcccagctactcgggaggctgaggcaggagaatcacatgaatccaggaggtggaggttgcagtgagctgagatcttcccactgcactccagcctggccaataagacctgtctccagcaagaccctgtctcaaaaaaaaaaaaaaaaattgcatattgactcctgaagaacttcaagccatgttgagatccattcatttgatggacattttctaagtacctgtgagccaggtgctgccatttcaaagtctcttcttaccacgctcctcagtggctagacattttcacgtggccagaaagtcccgactcttgctgggcgtccctggacaagttgccttcctcctctgagcttggcgctccccatctgtatagtggagacccttggcccccctctgtacggaagggccgatgcgaagctgcagttaaaaaaggctcacatgctcctagcctcgtgcagtcaggaggggagaccaggacagttggaaattatgattgcaaatggctttgcattttagatcattcgtgtgtgtggatcagagaaacgcacaagttccctggcacaaaggaagccctcagtagacacgtctagggcaggcttgagagatcagatggcgtgaaaggcttgtgatctgttcgtctcaggctccccctaaaccaaagaaatggaaacagctggttggggttccacgatccagctctatcaaggggctctgagtgtgcacagttgggacctggatgtatcaggtctccctcaggctggagtccactgtcactcattcagccattgaacaaacatacagatgcttacctgctctgtggtcagccttgtgctgctgctgggcgggccaggagcctgcttcagtgtgagcgaggtggatgatattatagctgaagggtccctcctggtcaccctcatctcagcctaggtcaccaggatgtctgagaggggtgggtgcatgggacgggcgtggccagtctcaggtgaggtttgggcccagacctcgttggagtcccagacgttgccaggctgttggaaaattgccttgttcctgtgatgcctgggagttaggtgggtcctggggaggtttcatcctcttgcttgtccacctcagctcggtgtggaggggcagccaataaatcattgtgaatgaaccctcatggcttgtctgatttatgcctgggattttgttttttgtttttgtttttgtttgagaccgagtctcactcttgcccaggctggagtgcagtggcccgatcttggctccctgcaacctccacctcccgggttcaagcaattctcctgcctcagcctcccgagtagctgggataataggtgcccgccatcacacctggctaatttttgtatttttagtaaaagcggggtttcaccatgttgccatgctggtcttgaactcctgacctcaaatgatccacccaccttggcctcccaaagtgctgggattacaggtgtgagccactgagcccagccacatgcctgggattttggcctcaagatgtggggatggctgggcatggtggctcatccctgtaatctcagcactttggagggctgaagcgggcagatcacctgaggtcaggagttcaagaccagcctggccaacatggtgaaaccctgcctctactaaaactacaaaaattagtcaggtgtggtggcaggtgcctgtaatcccagctactcgggaggctgaagcaggagaatcgcttgaacctgggaggtggaggttgcggtgagctgaggtggagacattgcactccagcctggacaacaagagcaaaactcattctttaaaaaaaaaaaaaaaaaaaaaaggctgggcatggtggctcacacctgtaatcccagcactttgggaggccaaggcaggtggatcacgaggtcggtggatcacgagttcagtagatcaagaccatcctggctaacatggtgaaaccccatctctactaaaaatacaaaaaatcagctggatgtggtggcgggcgcctgtagtcccagctacttgggaggctgaggcaggagaatggcgtgaacctgggaggcagagcttgcagtgagcggagatcgcgccacagcactccagcctggcagacagagcgagactccatctcaaaaaaaaaaaaaatgtatactgtgtacagtatacattacatacattatatgaaatcctagaaaaagcaaactaatgtataattacagaaagctgatcagtgggtgcttggggaaaggcaggtagggtggggtgggcaggagggattttgaaggggcaaggggacatgagtgatgagtctgttaacttctttgattgtgttagtttctcgggtctatacacatgtcagaacctattacattgtacattgcaaatacacacagtacctcatttgtcagtgatgcctcaataaagctgtaaaaaagaacccttcaattataagggaaaaaagtgcgagcttggtggctcacgcctgtaatcccagcactttgggaggctgaggcaggaggatcactggagcccaggagttggtgatcagcctgcacaacatagtgagactctgtctctacaaaaaaaaatttaaaaattagccgggggtggtgactcgtgcctgtaggcccaggcactctggaggttgagtggggaaaatcacttcagcccaggaggttgaggctgcagtgagctaagattgggccactgcacttcagcctgggcggaacagtgagaccctgtctcaaataaataaataaaataagaataaagtagaaaaaaactccacaccaaattgggcaaaagaagctgggcatggtgactcacacctgtagtcctagctactctggagaccaaggcaggaggatcacttgagcccgttaggtggtgtccaacctgggcaacatagcaagaccctgtctcaaaaaaaaactgggcaaaagatttgaatagacaccaccaaagaaattatatggttggcagatatcatataaattgcacattaaaaccacaagcatatgccactgcatacctgttatgaattgaattgggttcctctcaaattcatttgttgaagtcttaacccctaaggtattagggggtgggacccttgggagatgattaggtcatgagggtggggctctcataatgggattagtgcccttacagaagaggccccaaagaaacactttgctcttcctaccatgtgaggacacagagagaagacacgtatgaaccaggaagccggcccttaccacacagtgaatctgccagtatcttgatcatgaacttcccagcctccagaactgtgagaaataaatttccgttgtttataagccaccattttctagtattttcttgtagcaccctaaatggactaagacaggagataaggcctttttttttttttcttttggagatggagtttccctcttgttgcccaggctggagtgcagtggcgccatctcagctcactgcaatccctgcctcccaggttcgatcgattctcctgcctcagcctctgggattacaggcatgtgccaccacgcccagctaattttttgtatttttagtagagacagggtttcaccatgttggccaggctggtctggaactcctgacctcaggtaatccacctgcctcggcctcccaaagtgctgggattacaggggtgagccaccgcacccggcctaatttttttgtagagttggggtctccctatgttacccaggctggtctccagcttctggctcaagtgatcctcttgccttggcctcccaaagtgctgggattacaagcatgagccactgctccccgccaccttttagaatggataaaataaaaataaccgacaatatccagtgtaggtaaggatttgggggcagctggaactcacacactgctggtgggagacaattggacagtttcttttaaggttttttatgtttttaaaatttttaattttttacatttttttttgagacagggtattgctctgtcgcccaagctggaatgcagtggctcaatcttggctcactgtaacctccgcctcctgggttcaagcgatccttccacatcagccccctgagtagctgggactacaggtgcatgccaccatgcctggcaaagttttgtattttttgtagagtcggagtcgtgctctgttgcccacactggccttgaactcttgggctcaagcaatcctcctgcctcagcctcccaaaatgctgggattacaggcgtgagccaccatgcccagtcagatacacatcttcagccatgagaagaatgcaaatcaaaaccacagtgagttgtcacttcacatccaacaaaatggctaaaattaaaatgacaatatggtcattttagtgctggtgaggatgtggagcaataggaactctcatatgctttggtaggaaggtaaaaaggtgcaaccactttggaagacaatttggcaggtttttttataagttaaacatagaagccaggtgcaatcgcttacgtctgtaatcccagcactttgggaggccaaggtgggcagatcacttgagttcaggagttcgagaccagcctggtcaacgttgtgaaaccctgtctctgctacaaatacaaaaaattagccaggcgtggtggtgtgcacctataatcccagctacttgaaggctgaggcgggaggagcccttgaacctgggatggggaggttgcagtgagctgagattgcaccgctgcactccagcctgggtgacagagcaagattctatctccaaaaaaaaaaaaaaaaaaaaaaaaaaaaccaaaacaaaacaaaacaaaaaacaaaatgttagcctggcacagtggctcacccctgtaatcccagcactttgggaggccgaggtgggcagatcacttgagatcaggagtttgagatcagcctgaccaacatggtgaaaccccaacaaggtgtaattttgtaaaaatacaaaaattagccaggcatggtggcacctgcctgtaatcccagctactcaggaggctaagacgggagaatcacttgaacccaggaggcagaggttgcagtgagctgagattgcgccactgcactccagcctgggtgacagagcaagactccgtctcaaaaaaaaaaaaccaacaaaacaaaaacactataagttaaacatagggtggtcatgggtgactcacacctataatcccagggctttgggaggtgcaggacggaggactgttttagcccaggaggttgaggctgcagtgagctgtgatggtgccactgtactgaagcatgggtgacagagcaagactctgtctttaaaaaaacaaaaatgtgaataaatgaacagctgtgctccgcccatagtattgcctactgttcagcgaaaaaaaaaaaaaggcggtggaggtggtgaacatgcaaaaacatgaatgagtctcgaatgtatccagattggtgggaaaaagccatacaaaaaagaatgtgtaatataggcatccatttatctgaaatcctagaaaaagcaaactattgtaacagaaagctgatcagcatgtggttggggaaagaaggacagggtagggcaggtgagaggaattttgcagtggcaccaggaaactcgggtgatggatctgctgatggctttgattgtgctggtttcttgggtctatacccatgtctgaatctattaaattttacttttgggtttttgttttgttttgttttttgagatggagtcttgctctgtcacccaggctggagtgcagtggcacgatcttggctcactgcaacctctgcctcctgggttcaagtgattctcctgcctcagcctcctgagtagctgggattacaggtgcccaccgccatacctggctaatttttgtatttttagcagagacagggtttcaccatgttggccaagcttgtctcaaactcctaacctcaggtgatctgcccgcctcggcttcccaaagtgctgggattacaggcgtgggccaccgtgcctgtgcctggtctaaattttgctttgattacttaagatttaaaaaaaaattaacttttttcttatttatttatttagagagacagagtctcgctctgtcgcccaggctggagggcagtggtgcaatcttggctcactgtaacctctgcctcctgggttcaagcaattctcctgcctcaacctccagagtagctgggattacaggtgcccaccaccacgcctggctaatttttgtatttttagtagagacggttttgccatattggcccggctggtctcgaactccttgcctcaaatgacccacctgcctcagcctcccaaagtgctgggattacaggcttgagccaccacgccggcctcttttttatttatttttaattaattattttttacttctttttttcccactcattcaacctaagtacttaaaagttttcattttatatatgcatagttcatctatcagttatgcctcagtaaagctataaaaaaagaagctttcaattataaggaaaaaaagtctgggcatggtggctcatgcctgtaatccccgcactttgggaggccgaggccaaaggatcacttgagctgaggagttcatgaccagcctggccaacacagtgagacccagtctctgcagaaaaaaaaaaaaaaaaaaattagccagttgtggtgatgtgagcctgtaatcccagctactcaggaggcagaggtgggaggatcgcttgagcccaggagttcgaggctgcaatgagctgagattgcaccactgcactccagcgtggatgacagagtgagaccctgtctcataaataaatgaataggctgcagtaacatactccagacagagtcgcttaagccacagacatttatttttccctaattcttgagggtggaagtttgacatcaaggtgtcagttggttttgtttctcaaggcctctctgcttgggtggcagacggccgccttctctgtcctcgtatagtcttccctcttcgtatgtctgtatcctagtctcctctgcctacgaggacaccagtgaattagatcagggcccacctatagactttttttaaaacttaattatctttttttttttttttgagatggagtctggctttgtggcctaggctggcgtgcagtggcgccatctcggctcactgcaacctccacttcccgggttcaagtgattctcatgcctcagcctcccgagtagctgggattacaggcacgtgccaccatgcctggctaatttttgtatttttagtagagatggagtttcaccacgttggccaggctggtcttaaactcttgatctcaagtgatccacccacctcagcctcccaaagtgctgggattacaggcatgtgagccaccctgcttgactgactattttaacttaattgtctctttaaagaccttatctcaatcagtttggtgctaaaaaaatttaaaaaaaaaagaccttatctcctgttttagtcctttcagtgtgctacaacaaaatactataaactggtggcttgtaaacaacagaaatttatttttcatggttctggaggctgggaagttcaagatcaaaatgctggcagattcactgtctggtaagggctggctatctggttcacagatggtgtcttcttttggtgtccccacatggtagaaagatcaaggagtttcttgggggcctcttgtggaagggcactaatcccattatgagggccacatcctcatgacctaatcacctcccaagggccgcacctcctaataccatcaccttggggctaattttggactcaggtgatcttcctaccttggtctcccaaaacaaagggatgtgagtctctgtgtccagcgtcctttaaggatggattaaattaaagtaactgacaatgcctggtgcaggtaaagatttgggggcagctggagctcgcacactgctggtgggagacaattggacagtttcttttaaatttatttatttatgtatttatttgagatagggtatcactctgtcatccaggctggagtccagtggtgcagtcataggtcacttcagcctcgacctcctgggctcatgtgatcctcccgcctcagccgcttgagtagctgggactacaggcacacatcaccacatccagataatttttgtattttttatatagatgatgtctcgccctgttgcccaggctggtctgaaactcctgggctcaagtgatcctcctgcctcagcctcccaaagtgctgagattacaggtgtgagccaccttgcccagactgatagtttcttattaaattaaacatcacttaccctataaacacaacaatccctgatagtttcttattaaattaaacatcacttaccctataaacacaacagtcccattgtggtgaaacaaaaattcacctattttttttttttttggtaatcaccaaaaactgggaacatcccaaatgtccatcagttggtaagcggatgagccacctggtttatgcatgtgatggaacattacacagcaatgaaaaggagtgaccttctacagcagtgtggttgaatctcaaatgcatttgctaaatgaaagaatccagacccaagagactgtgtgctcccattggcgggacattttatctttagagatggggtattgctttgtcacccaggctggagtgcagtggcaggaacatggatcattacagcctcaaattcccaggctcaagggatcctcccgcctcaccctcctgagtggcagggattgcaggtgcgtgccacatactcggctgtaggtcattttagaaatacaaaattttgggctaggtgcagtggctcacacctgtaatcccagcactttgggaggccgaggtgggtggatcatttgaggtcaggagtttgagaccagcctgaaaccctgcctctactaaaaatacaaaaattagctgggggtggcaggtgcctgtagtcccagctactcaggaggctgaggcaggagaattgcttgaacccaggaggcagaggttgcagtgagctgagatcgtgcaccactgcactccagcctgggtgacagagcgagactccgtctcaaaaaaaaaaaaaagaaaagaaaaggaaagacaaaattttaagtatagaaaacagatcagtggctgccaggagttgagatggaaggagagattatccacaagagagacagaggaattttgggagggaagggactgttctgcatttttaacgtggcagtagttacacaactgtatatgtttgtataaacttgcagaattcgcccggcagcgtagcccttttgggaggctgaggtgggaggatcacctgaggccaggactttgagactagcctgggtatcatggtgaaaccccatttctgcaaaaaatacaaaaattagccgggcatggtggcatgtgcctgtagtcctagctactcaggaggctgatgtgggagaatcacttgagcctgggaggcagaggttgcagtgagccgaaattgcaccactgcactgcagcctgggcaacagagccagacctgtctcaaaacaacaaacaaaaaaacaaacaacaaacaaaacaaaaaacccacaaagaaacactacaaaaaaaaccttgcagaattttgtggctaaattctaccttaatctaaaaagaaaaggaaaaagagagcagcctttggggtttcccaaatctgttcaaatcctgtctttgtttttttttttttttttttttttgacagattctcactctgttgcccaagctggagtgcagtggtgccatcttggctcactgcaacctccgcctctcgggttcaagtgattctcctgccacagcatcccgtgtagctgggattgcaggcaagagccaccatgcctggctaatttttgtatttttagtagagtcagggtttcaacatgttggccagggtggtcttgaacttctgacctcaagtgatcctacccgcctcggtctcccaaagtgctgggattacaggtgttagccaccatgcctggccaaaccctggcttttaatctccgagatacgtagcttgggcaagtaactccccttctctgagcctcaatttcctcttaggatggctaggaggagtgactggaaagtccttggcacaaagtgaggtctggagttgggacaaaagctgcctctgtcaaagtgctcacagaacccctggtcgggttcatttagcatctggtgggtgttggagataagtcggctccctgccttctggcactaatgttctgagatctcattttccaagagaacagattgtaccaaaatagcctcccagcctagtctgcgaagggggtgtgcaagccactggccaggtggagaatgattggcggggcaggctggggctgttgtcccagtgtgggtgtgagaacttggaggatcggctctcaaagtccaggctaatttggctgcaagttacactcagtaacttccttggtcttggaatgagagaaagtttctttttatcctttttaaaaaaaattgtggtaaaatacacaacataaaacttatcatcttttttttgtttgtttgagacagggtcttgctctattgcccaggctgaagtgcagtggcacaatcacagctcactgcagccttgacctcctgggctcaatccatcctcccacctcagcctcccaagtagctgggactacaggtgtgcaccaccatgcctggctaatttttttgtatttttagtagacaccgggtttcaccatgttgcccaggctggtctcaagctcctgagctcaagcaatccacccaccttggcttctcaaagtgctgggattacaggcatgagccaccacacatgtcctaaatttcttagccacatttgagtgtatacttcaggggcattaagtatattcacattggctaggcatggtggcccatgcctgtaatcccagcactttgggaggccaaggcgggtggatcacttgaggtcaggagttcaagaccagcctggccaatatggtgaaaccccatctctactaaaaatacaaaaattagctgggcgcagtggcacgcacttgtaatctcagctactcaggaggctgaggcaggagaatcacttaaacccaggaggcggagtttgcagtgagcccagactgtgccattgtactccagcctgggcaacagagcgagactccatctaaaaaaaaaaaagtatattcacattgttgtgcaaccaccaccattacccagctccagaaatcttttcatcctgcaaaggtacccattaaacactcactccccacttccctcttccagcccttggcagcaccattgtactttgtctctctgaatttgatgactctaggaacctcatataggtacaatcatacaatacaggtgctctccgatttacaaattacaattttcttgagtttacaatgtttcaaaagaggccaggtgcagtggctcacgcctgtaatcccagcacttcgggaggccgaggcgggtggatcacctgaggtcaggagtttgagaccagcctggccaacatggtgaaaccctgtctctgctaaaaatacaaaaaaaattagccaggcatggtggtgggcgcctgtaatcccaggactttgggaggccgaggtgggcggatcacctgaggtcaggagtttgagaccagcctggccaacatggtgaaacctggtctctactaaaaatacaaaaaaatttgccagacgtggtgggcacctgtaatcccagctacttggaaggctgaggcaggagaatcacttgaactggggaggtggaggttgcagtgagccgagactgtgccattgcactctagcctggacgacagagcaagactctgagactctgtctcaaaataaataaataaataaaataaaaataaaaataaacaaaaaataaatgtttcgaaagagattcacattcagtagaaaccatgcttcaagtacccacaccaccattctattttactttcaggacagtatttaataaattacatgagctattcaacactttattacaaaatgggctttgcgttagttgattttgcccaagtgtaggttaatgtaagttttctgaccatgtttaaggacaactaggtgaagctatgatgttcagtaggttaggtgtatggaaatgcctttttttttttttttttttttggagacaggttcttgctctgtcgcccacgctggagtggtgcagtggtgcgatcttggatcactgcaacctctgtctcctgggctcaggtgatccttccactcagactcctgagtagctgggattacaggtgagcaccaccacgctggctaattttttgtatttttagtagagatggggtttcatcatgttgcccaggctgacctcgaatttctggattcaagtgatcctcctgcctcggcctcccaaactgttgggattacaggtgtgagccactgtggtgcaattatcccacactacagcttcaaactcctaagttcaattgatcctcctgcctcagcctcccaagtagctgggactacaggtgtacaccaccacacctggctaatttttaaatgttttgtagagatgaggtcttgctatgttgcccaggctggtcttgaactcctggcctcaagtgatgctcccactttggcctcctaaaatgctgggattacaggtgtgagccaccatgcccagccataagcaggtattttacatataatagatcgtcaaggtggtttgttaccctcattttgtggaaaataaatgaggctgggtgctaaggtgagtggaggtcagtcacctcttactgacagtgggtcagaattgaaatccagtcttggtgcagtagctcacgcctgtaatcccagcactgtgggaggccaaggcaggcagatcacctaagttcaggagttcgagaccagcctggccaacatggcgaaaccccgtctctactaaaatacaaaaaatcacccagacaaggtggcacatgcctgtaatcccagctcctcgggaggctgaagcaggagaattgcttgagcctgggaggcagaggttgcaatgagccgagatcacgccacagcactccagcttgggtgacagaatgagtgaaactccatctcaaaaaaaaaaaaaaaaaaaaaaaagaattgaaatccaggcccatctcattctaaagctatgctttttcttgcacatttcacttctctgattctctttaggaatatgtaagatacatgcatggaacaattcagcattatccttgacactgagcaggcatcagcaaataatacctagagcaggcattagcaaaggcaagttcttatcctgctctcctggttcctagatcatcatccctggtgaccacagacgtgggtggttatgactgcgtttacactgtgctttcctgttagcgcctgcctgaaggcatgtaggaaaactcccagctcaattagtggaggaaattgaggccattgaagccagctgagaggtgaaagtgactgcacaaagacagatgttggcaggcctgagtgtgagctctggttttgcaactaacttgcgtgtgacctttggtgaacccttcttggctgattgaaaatgttgaactaggccggcccggtggctcccaaagtcctgtaattccagcactttgggaggcctaggtgggcagatcacttgaggtcaggagttcaagaccagcctggccaacatggcaaaacctcatctctactaagtacaaaaattagccaggtgtggtggtgggcacctgtaatcccagctactcgggaggctgaggcaggagaattgcttgaacccaggaggcggaggttgcagtgagccgagatcacaccactgcacttcagcctgggcaacacagcgagactctgcctcagttgaaaaaaaaaaaaagaaagaaaaatgttgaaccaggcaggtcaagagtgtgtaaaccatggcccaagggccaaatctggcccctacttgtgtttgtaaataaaattttcttggcacgcagccatgctcatttgtttacttatcgcctatagagatttattattattattattattttcttttttgagacggagtttcgctcttgttgcccaggctggagtacagtggtgtgatctaggctcactataacctccgcctcccaggttcaagtggttcttttgcctcagcctcccaagtagctggggttacgggcacctgccaccacgcccggctaatttttgtagttttagtagagacggggtttcaccatgttgaccaggctggtctcaaactcctgacctcaggtgatctgcccgcctcggcatcccaaagtgctgggattacaggcctgagccactgtgcctggtacctatagtggatcttgtgctacaacagcagagttgagtgatttcaacagaccaccttacctgcacagctgaaaatattcactctctggccctttgcagaaaatgttggccaacccctggactggatgatgctgaagatcccttctaactctaaatatctgaattcatagaggaagtgaacattgcaattaactaggcaaaaaccaagagaaatttatcaaactctgagctgcacaaatgagtatctcaccatcccgcaaatgtccatgtttcctcaacagaaactgaccatggggctgggtgtggtagctcatgcctgtaatcccagcactttgtgaggcagaggaaggaggatcacttgaggccaggagttcggaccagcctggccaacatggcgaaaccccatctctattaaaaatacaaaaattagccaggcatggtggcacgtgcctgtaatcccagctactcgagaggcagaggcacaagaattgcttgaacctgggaggcagaggtcacagtgagctgagatcgtgccactgcactccagcctgagtgagacagtgagactctgtctcaaaacaaacaaaaacaaaacaaaacaaaaacaacaacaacattggtctgaggccaggcatggtggctcacgcctataatcccaacatttagggaggataaggtgggtggattgcttgagccccggagtttttgagaccaacctgggcaatgtagcaagaccccatctttacaaatatgaacaaaaattagtctggcatgctggcgtgtgtctgtggtcccagctaacttgggaggctgaggtgggagggtctcttgagcctgggaggcagaggttgcagtgacctgagattatgccactgcactccagctttggtgtcaacgtgagaccttgtttcaaaagaaaaaaaaaagtctttggtctgtcttacactgggaatggttctactcattcatgcctataacatgcattgatcatttggaaaatattagttcaatgagtgatgcagatgttgtcccattacattattttgtatcaaaaaagtcctcttcattaatatcactattcatctcatcagaaaagtgtgcagccgtgcaatcatagctcactgcagccttgacctcctgggctcaaatgatcctcccacctcagcctccttggtagctgggactgtaggcgcacatgccagcacgccgggataatttttttaaaaaactttttatagagacagggtttcactttgttgcccaggctggtctcaaactcctgacctcaagtgatcttctcgcctcagcttcccaagtagctggggttacaggcttagaaaagtctttaaatgtcaagaagctgccaaactcacagtggtggctacacattttccaaaattctgatttctccttaaaagcttgaattttattgtgggcaacaaaacctgaaattgttttccttgaagtgacagcctcattttgttcatttttgagaaaatgtctgccaagcagccacatctgaatcacagtttgtcagacatttccagtaaaaatggtgttacccgagaaaggccactagcttggctgtggaggcagcaaaccatcattcaatcacgttttctagagatgaccaaggactgaatcctcagcaggggaattttatgtggacctcccgtattgctagtcagaatatgaaaaagacatgccctctcctgttatggggcaaattgtgtcccccccaaaagatatgttgaagccaggctgggcacagtggctcacgcctgtaatcccagaactttgggaggcttggagtgggggggggggggtggatcacaaggtcaggagttcgagaccacactggccaacatgacaaaaccccgtctctactaaaaaaaatacaaaacttagccaggcatggtggcaggcacctgttattcagctacttgggaggctgaggcaggagaattgcttgaacctgggaggtggaagttgcagtgagccgagatcgccccactacactccaacctgggcgacagagtaagactctgtcacaaaaacaaaaacaaaacaaaacaaaaacaaaaaacaacttcctattgggtactgtgttcactatctgggtgacgggatcaatggaagcctaaacctcagcatcatgcaatatattcttatgacaaacctgcacatgtaccccctgaatctaaaataaaaatggaggccgggcgtggtggctcacgcctgtaatcccagcactctgggaggctgaggcaggtgaatcacctgagatcaggagttcgagaccagcctggccaacatggtgaaaccccgtctctactaaaaatacaaaaactagctgggcatggtggcaggcgcctgtagtcccagctactgggaagggaggctgaggcaggattatcgcttgaatctgggaggcagaggttgcagcaagccaagatcatggcattgcactccagcctgggcgacaaaagcaaaactccgtctcgaaaataaataaataaataagtaaaataaaaatggaaatttaaaggaagaaagaaatggtgcttactgtctgtgtcctcacatggcggaatgagagaaagcagctctctgggacactctctcttgttttttgctgtttttgagagagtctcactctgtcccctaggctggagtgcatgagtgagattgtaactcacagaagccttgacttcctgggctcaagtaatcctcccacttcagcctcccaagtagctgggactacaggcgcgcaccacctcgcccagctaatttttgtgttttttggtagagacagggttctgctacattgcccatgttggtcttgacctcctgggctcaagtgatacttccactttggcctcccaaagtgctgggattacaggcatgagccaccgtgcccggcctgaacctgtctattttcacctgatgtgttatcctaggatattttctgcagtgttacacggtgtctgtgaacaatttgataggtagtggccagccacatgtgcccatttacattaacacgaatgacaattacataaaatggaaagccctccttcttggtggaattagcatcctttcaagtacttggtcaccacacgtggctggcggctgctggacagctcccatagggaatattcccatcattacagaaagttctgtcagacagcgcctccctagaaaattcctaatcaacacctaaaaataaaaatgaggtcacaggcaagtcgcagtggctcacgcctgtaatcccagcactttgggaggctgaggcaggcaggtcacttgaggtcaggagtttgagaccagcctggccaacatggcgaaaccccctctctagtaaaaatacaaaaattagccaggcgtggtggtaggcatctgtaatcccagctgctcgggaggctgaggtggaaggatcgcttgaacccaggaagaggaggttacagtgagccaagattgtgccactgtactccatccagcctgggtaacagagtgagacccccatctcaaaaaaaaaaaaaaataggtccctataatacattcatgtgggaaaaaattcagagctatgaaggcgggaggagtgcaaggcaagttggcccccagtacccctccgcagacatccctttttccccttactcaaatatccttttagaaatattctttccagttgggcgggcatggtggctcatgcctgtaatcccagcactttgggaggctgaggcaggaggatcacttgagcccaggagatcaaggctgcaaggtaaaaacgaggtaggtgtgggagctcatgcctgtaatcccaacactttgggaggccaaggcgggaggattggttgaccctaggaattagaaaccagcctggaactgagctgtgatcacgtcaccgcactccagcatgggtgacagaatgagaccctgtctcaaaaaaaaaaaaaaaaaaaaaaagaaactattttcatatgtaaccatgcacctcttttgcatcttgttttttctttctttttcttcttcttctccttctcctccttcttctttttttgtttttgagacggagtctcgttctgtcgcccaggctgaagtgcagtatcgggatcttggcccactgcaagctccgcctcccagattcaagcaatttctcctgcctcagcttcccgagttgggactacaggcacccgccaccatgcctggctaatttttgcatttttaatagaggcgggtttcaccatattggccaggctggtcttgaactcctgcccttgtgatccccccgcctcagcctcccaaagtgctgtgattacaggcatgagccactgtgcctgcctttctttttcttctgcttctttttttttttttttgtgtgtgtgatagactggaatgcagtggtgtgatcacagtttactgcagccttgaactcctgggttcaagcagtccttctgcctcagcctccaaaagtcctgggattacaggtgtgagccattgtgcccggccttttttcttttctttctttcttcttttcactatctattttggaaatttttccttattagtaccacagtggtacctctgaaggatctagggcaagattcttttttttttttgagatgaagtctcgctctgtcgcccaggctggagtgcagtggcacgatctcggctcactgcaagctccacctcccaggttcacgccattctcctggctcagcctcctgagtagctgggactataggcgcccgctaccacgcccggctaattttttgtatttttagtagagacggggtttcactgtgttagccaggatggtctcgatctcctgacctcgtgatccacccgcctcggcctcccaaagtgcggggattacaggcgtgagccaccgcacccggccgattcttttttttgttttttgatacagagtctcactctgtcacccaggctggagtgcagtggcactatcttgggttccactccacctcccgggttcaagtgattctcctgcctcagcctcctgagtagctgggattacaggcataggtccctaccacctggctaatttttgtatctttaatagaggaggggttttaccctgttggccaggttggtctcaaactcctgatctcaggtgatccgcccacctcggcctcccaaagtgctaggattacaggcgtaaaccaccctgcccagccaagaccccatctctattttaaaaaatacaaaaattagccgagtgtggtggcacatacctgtagtcccaactactcaggaggctgcggcaggaggattgcttgagcccaggacgtcaagggtgcagtgagccatgatcacgccgctgcactgtgaatgtgcccttatttagagataggatctttgcagatttaactaaattaaggaatttgagatgagatcattatagattgtctagatgggccctaaatccaatgaaaatgtggaattttgagagagcaagaccatgtctcaaaaaaaaaaaaaaaaaaagggccaggcagggtggtataatctcagcactttgggaggccgaggcgggcggataatctgaggttggaggttcaagaccagcatgaccaacagggagaaaccctgtctctactaaaaatacaacagtagccgggtgtggtagcgcatgcctgtaatcccagctccttgggaggctgaggcaggagaatcgcttgaacccgggaggcggaggttgcagtgagccaagatcgcaccattgcactccagcctgggcaacaagagcaaaactccgtctcaaaaaaaaaaaaaaaaaaaggaaataggatctttgcagatgcaaagatgtaattaagataaggttatattggtttagggtgggccctcctctcacccacaaccctccaaaagtaaactatgaacagtcctttttgttatgcacatataaacacatatacagaggccaggctcggtggctcatgcctgtaatcccagcacttttggaggccgaggcaggcggatcacttgagatcaggagtttgagaccaacctgaccaacatggtgaaaccctgtctctactgaaaatacaacaattagctgggcgttggggaaagagttcgtttgtttggacaacacgcttcctttggcactttgctcttatattgatgggacataaacatttttttgtggcaatgctctgaagatctaattcatttatttcaatgcctgcaggtaattccattgatggggcataatttatttatccaatctcctattgatgtcatttatttatattattactaaatttctgaaatttacatttcagaaatttacaaaatttcttttcttttcttttttagatggagtctagctctgtcacccaggcggaagtgcagtggtgtgatctcagttcactgcaacctccacctcccaggcttaagggattctcctgcctcagcgttctaagtagctgggatcacaggtgtccaccaccacgcctggctaaattttttgtatttttagtagcgatggggttgcaccacgttggccaggctggtctggaactcctgacctcaggtgatccacccaccttggcctcccaaagtgctgggattacaggtgtgagctactgtgcccagtaacatttacaaactttctttctttctttcttttgttttttgagatggagtttcactcttgttgcccaggctggagtgcagtggcgtgatctcggctcactgcaacctctgcctcccaggttcaagcaattctcctgcctcaacctcctgagtagctgggattacaggcacgtgccaccacacccagctaattttttgtatttttttagtagagacggggtttcaccatgttggccaggctggtctcgaactcctggccttagatgatcctcctgcctgcttccccgctcacaggcgtgagccaccacgccaagccccaaaatttctaatttttgatattatgattgatgctgggatgttgggttctggaaccagactacctgagtccaaatcacacctcagccatttacaagttatctattgctgtgtaacaggtgttcaccaaaacttagccacttaacaaatatttattatctcatggttttcgtgtgagagaaattcaggagcttagctgggtggtttaggctcgggatctctcctgaggttaccatcagatgtcagccagagccaggcgcagtggctcatgcctgtaatcccagcactttgggaggctaaggcaggcgggtcacctgaagttaggagttcaagactagcctggccaacatggtgaaacctcatctctactaaaaatatataaattagccgggtgtggtggtgtgcatctgtaatcccaggtacttgggaggccaaggcaggggaatcacttgaacctgggaggcggagattgcagtgagccgagattgcaccattgcactccagcctggatgatacagagaaactgtctcaaaaaaaaaaaaaaaaaaaaaaatgtcagccagggctgcaactatctgaagacttgactggggctggaggatccacttccaaaacgtcacccttagctggcgtttggctggaggtctcagttccttaccacatgggcttttgcacaagctgcttgaattttatcatgacatgacacctaacttccccagagcaagcaatccaagaaagcaaagaagacctagtaccatttctgatctggtctgagtcaaacaccatcacattgctttattcaagtcactaagtccagcccagagtcaaggagaagccaattaggtgttattctcttttctttctttctttctttctttcttttttctttctttccttctttcttcctttctttttctttctttctttcttttttctttctttctttccttctttctttctttctttttctttctttctctctctctttctttctctatttttctttttccttccttccttctctttctccctttccctcccctcccctcccttcccctccccttctcttcccttcctttcctttttttgagacagagtcttgttctgttgcccaggctggagtgcagtggcgtgatcttggctcactgcaacctctgcctccaggtttcaagtgattctcctgcctcagcctcccaagtatctgtgattacaggcaaatcttggctcactgcaacctctgcctcacagattcaagcaattcccctgtctcagcctcctgagtagctgggactacaggtgtgcaccaccacgcccagctaagttttgtatttttagtagagacagggtttcaccatgttggccaggatggtctcaatctctcgacctcgtgatccgcctaccttggcctaccaaagtgctgggattacaggcgtgagccactgcacccggctagttttttgtatttttagtagagacagggtttcatcatgttggccaggctggtctcgaactcctgacctcaggtgatctgcctgctgcagcctctcaaagtgctgggattacagacgtgagccaccgcgcccagctgatacttagtttcttacatggttgaatctcagagtatttggctgacttgaggcctcttagcttgggcatcattggctgctagaaaatccaaggaccggaattagaggttccgtgcatcctgtaagagtgtaggcaaaattgtgtgcacgtgttatttggtaggaggaggtccaaagcttttattgagggtctcatgtagtctgtgatcccaagaagaatatggctcactgtgcaaaagtgagacctcctgttgtatttgttcccaatgttttctttctttcttttttcttttcttttttttttttttgagacagagtcttgcactgtcgcccaggcaggtgtgcagtggcacgatctcggctcgctgcaacctccacctcccaggttcaagcaattctcctgtctcagcctcctgagtagctaggattataggcgcccgccactgcgcccagctaattttttgtatttttagtagagacggggtttcactatgttggccaggctggtcttgaactcctgacctcatgatccactcgcctcagcctcccaaagtgctgggattacaagcgtgagccaccacacccggcctgtacctgatattttctgatgacaatcttcttccactggagcattggatcttcaatactgaggcacatcttctccctatacaacatacagataaaaaggaagttgaaatcagagagaaataaaaagacattttatattttattccgcttcattttcatttcctttttttttttttttttttaagctggagtctcggtctgtcacccaggctggagtgcagtggtgtgatctcgactcactgaaacctctgcctcccaggctcaagcgattctcgtgcctcagcctcctgagtagctgagattacaggtgcatgccaatacacccggctaatttttgtagttttagtagagacagggtttcaccgtgttggtcaggctgttctcgaactcctgacctcaggtgatccacccacctctgcctcccaaagtgctgggatttcaggcatgagccaccgcgcccagccctgctccattcccttcactgcataccttaataattccttttcggtaatcaggcacattttgaacttttatgaatagatctgtgattattctaagttcttaaattgttctgcagtcttttatgtttattatcataggcatagatggacctatattccttaccatgtcctttattattcaaccagtgtatcctctggttttttgcctatgttattaagtaacctattatctctggagttcatgaagttataatatcatttttattaaactgaatagaatggtatagcaatgacctcttaattacaatttgatttgactgcaaaactttttcctcctctataaggagatgatgtctgctttaagctgtaatgttttgccatgttgcaaaaagccacaataataaattaagtataaaaaaatacctgtcttagggctgagtgtagtggctcgtgcctatcctggctacttgagaggctgaggtaggaggatcacttgagccaagaagttcgaggctgcagtgaactgtaattgtgccattaaactgcagcctggtgatggagggagacctggtctctaaataagtaaattaacaaatagaccagactgagtggctcatgcccgtaatcccagaactttgggaagctgaggtgggaggatcccttcaggccaggagttccagaccagcgtggacaacatagtgagatcccacctcctcaaaaaatttaaaaattagtcaggtgtggtggtgtgcacctgtagtgccagctagtatggaggctgaggcaggaggatcacttgaccccaggaagcagtgagctgtgttcacgctgctgcagtcaagcatgggtgacagaaggagagcctgtgtcaaaaaaattaaaataaataaataaatcttgatattttattcattgtgtagtttctgcattaattttaatttttttttctttgagacgcagtctcgctctgtcgcccaggctggagtccagtgacatgatcttggctcactgcaagctctgccttccaggttcacgtcattctcctgcctcagcctcctgagtagctggaactacaggtgcctgccaccacacctggctaatttttttttttttttgtatttttagtacagatggggtttcgccttgttagccaggatggtctcaatctgctggcctcatgatctccccgccttggcctcccaaagtgctgggattacaggcgtgagccaccgtgcccggcccagtaattttaattttttaaaataatcactaggtgcagtggctcacgcctgtagtcccagcactttgggaggccggggtaggaagatcgcttaaggccaggagttcaagaccagcctggacaacatatcgagatccccatctctacgaaaaaaaaaaataaaaataaaaaaaataaaaaaattagccaggcaggtggcgtgcacctgcagtcctaactactctggaggctgaggtgggaaggttgcttgagcccaagagttcaaggttgcagtgaacaaggctatgctactgcactccagcctgggtgacagagtgagaccctgtctctaaaaatagtaataatttaaaaaaatgtatttaaggccgagtgtggtggatcatgcctgtaatcccagcactttgggaggctgaggcgggtggatcacttcaagtcaggagttcgagaccagcctgagcaacatggtgaaaccccgtctctactataaaaaaaaacaaaaaacaaacaaacaacaacaaaaaaaaacaaaattagccaggtgtggtggcgggtgcccataataccagctactcgggaagctgacgcaggagcatcgcttgaacccgggaggcggagtttgcagtgagcccagattgcgccattgcactccagcctgggcaacaagagccaaactccgtctcaaaaaaaaaaaaaaaagtatttaaatattatgtattatttggacacaataaaaaaattggaaaaaatattctttatctttgttgcttttttctctttttaccgctctcccccaatgttgctccctgtccagcgcctctccgcagcctctcctctgactctgccctgggttcaagctgcttctggtcattcgcgtgatggcctcgagggggcgctgcttccccactcatgctcagccaggactccttagtcagtttaattgggtttgttaacatcttccagcttagattcctcttctgcaaagtgggtattataatgttagccacgcagggatgacgaaggaagtgcagttgacccttgaacaacacgagtttgaactgtacggatgtactcaggcgtggatttttttccacccctgccacccctgagacagcaagaccaagccctccttctgttcttcctccttctccttctccttagcctgctcaaggtgaagacgacaaggatgaacacttttgtgatgatccacttccacttcatccatagtaaatatgttttctcttcctttgaagtttggacgggcacagtggctcactcctgtaatcccagcactttagaggccaagacgggtggatcacctgaggccaggagttcaagaccagcctagccaacatggcaaaaccctgcctctactaaaaatacaaaaattagccaggcgtggtggtgggcgcctgtaatcccagctactcagaggctgaggcaggagaatcgcttgaacccaggaggcagaggttgcagtgagttgaggtcatgccactgcactccagcctgggcaacagagtgagactccatctcaaataatgaaacaaacaaacaaaaaacaaaacaaaaacaaaacaccagaatttttttagtgacatttgcttttctctagcttacttattgcaagaatacagtatataatacatagaatgtagaaaatcagtgttcatcgaccatttatgtcatcaataaggcttttggtcaatagtaggtgttacatgcagtcaaaagttacatgcagatttttgactgtaggggtgagcttggcactcctaacccctgtgttggttctaaggttgactacacagaaatcccctagccctgggctcgtggttactcaatgcataaggataatcacgatttttttttttttttttaaaacagggtcttgctctgtcacccaggctggagtgcagtggtgcagtcatagctcactgcagcctcaacctcttgggctcaagtgatcctcccacctcagcctgcccagtagctgggactacaggcatgcaccaccaagtctggtgaatttttattttttgtagatatgggatctcactatattgtccaggctggtctcgaactcctgggctcaagcaatccacctgcctcagcctcccaaaatgctgggattacaggcgtcagccaacattcccagccactatttttttttttttttgagacagtcttgctctgtcccccaggctggagtgcagtggtgtgatctcagctcactgcaacttccgcctcctgggttcgagcaattctcctgcttctgcctcccaagtagctgggattacaggcatgcaccaccacgcctggctaatttttttttttttttgtatttttagtagagatgggatttcaccatgttggccaggctggtctcaaactctgggcctcaagtgatcatcccgcctgggcctcccaaagtgctgggagtgtgcccggccccagccactattttttaagagtacaaaattgaagcatattctgatagggaatttaaaacactcactaaagtaggcagaatagtataatgaaccgcagcccaccctaaccaccatcaccccctactcaacctcgccaaccccgcccccatcccatttgccttcctgtcaggtattattttgaagcaaatctcagctatcttatcattccataaatattttgttatatgtctctaaaacatacacactcttttttttttttttttgagacagggtctcactctgttgcccaagctggagcacagtggcgtgatcacgactcattgcagcctcaacttcccaggttcaagtgatccttccacctcagagtagcagggaccactggcacatgcaccatgtctagttaattttttaattttttgtaaaaatggagtctcaatatgttggccagtctggtcttgaactcctgagcttaagtgatcctcctgccttggcctcccaaactgctgggataacaggcatgaggcactgcacctggcccagactctttaaaagcctaaccagtctgggcatggtggctcatgcctgtaatcccagcactttgggaggccgaggcgggtgcatcacctgaggtcaggagttccagaccagcctggacaacatggtgaaaccccgtctctactaaaaatacaaaatattagccaggtgtggtggcaggtgcctctaatcccagctactcgggagggtgagacaggagaattgcttgaacgtgggaggcggaggttgcagtaagccaagatcatgccattgcactccagcctggatgacaagagcaaaactgtctcgaaaacaaaaacaaaaataaaaacaaaaacctcaccgcaataccattgtcacactgcaaaaactttgccaataattttttaatatctgtagattccagtttagccaataactgtggagttttggaatcatatccgaatttggctgttagctcacttccttgccaaggaaacttgggaaattgtttaacttctttgaagcctattttctttcttcttctttttttttttaaacgcagtctcactttgtcacccaggctggagtgcaatggcgtgatctcggctcactgcaacctccgccttccgggttcatgcgattctcctgcctcagcctctcgagtagctgggattacaggtgctcaccaccacgcccagctaatttttgtatttttagtagagacagggtttcatcacgttggtctggaagcctgttttcatcatcaatgaactgggatagtaaattgaagcccccagattgcttggagtattggagacagtatgtttcctaaaatttcagcccctaaaacttcttttcttttctttttctttttttgttttaaagagacagggttttgctctgttgcccaggctagagtgcagtgaggcaatcatatctcactgcagccttgactttctgggctcaagtaatcctcccacctcaacctcccgagtagttgggactacaggcacacaccaccacgcccagctaattttttgttattgttgttgttgtagagatgagggtctcactatgttgcccaggctggtcttgaactcctggccttgagtgatcctcccaccttggcttccccagtagctgggactacaggagcatgccactgtgcctggcagcacctgaaacttcttttttttttttttttgtgagatggagtgtagtgtggctctgtcgtccaggctggagtgcaatggcgtaatctctgctcactgcaacctctgcctcccaggtttaagtgatcctcctgcctcagcctcccaagtagctgggattacaggcacctgccaccatgcctggctaatttttgtttttagtagagatggggtctcaccatattggccaagctggtctcaaattcctgacctcaggtgatttgcccacctcggcctcccaaagtgctgggattacaggcatgagccaccgcgcctgaccaagtatctgaaacttctatccctgaaaatatagtaacactattattattactttttctttgagatggaggcttgctctgtcgcccaggctggagtgcagtggcgcaatctcggctcactgcaagctccacctcccaggttcatgccattctcctgcctcagcttcctgagtagctgggactacaggtgcaaaccaccacgcccagctaattttttgttttttgttttttgttttttatgtagagacagggtttcaccatgttagccaggatggtcttgatctcctgacctcgtgatctgcctgccttggcctcccaaagtgctgggattactggcgtgagccaccatgcctgggtgacttgtgagtttttgagacaaagtctcgctctgtcacccaggctggagtgcagtggtgcgatctcggctcactgcaagctccacctcccgggttcatgccattctcctgcctcagcttcctgagtagctgggactacaggtgcaaaccaccacgcccagctaattttttgttttgttttgttttgttttttttgtagagacggggtttcaccgtgttagccaggatggtcttgatctcctgacctcgtgatctgcctgccttggcctcccaaagtgctgggattactagcgtgagccaccatgcccgggtgatttgtgagtttttgagacaaagtcttgctctgtcgcccaggctgcagtgcagtggcaggatctcggctcattgcaacctccaactcccaggttcaaacaattcttgtgcctcagcctcccaagtagctgggattacaggcatgcgtcaccacgcccagctaatttttctatttttagtagagataggggtctcaccatattggccagtctggtcttgaatgcctgacctcaggtgatccgcctgcctcggcctcccaaagtgctgggattacaggcatgagccaccgtgcccggtcttggagttttaatggtaattaatcatggctaacatctcacgggcccttcctgtgatgtaggtgtagtgttagtctcactctctatataaatgcttttcattgtctcaccaacacaggaagttagtgagaaaattcaagtgcagagtagtgaagcgtcacaggcaagggacttcacctttctgcatcttgttttcttcatctgtgaaacaggatcataatgtctgtctcttggggtaataatgtggactgctaatgccaaatgccaaccaactgcacctcctagactgtcagcaaatggcatcttttacgaggagccgtatcagcctggcacacaatagttaaccactaagtctgggctgaatgcccggctaagctggtgccctagtgcaaacaatcgctttcattatcccagttgctgggagaattgggcaaggagagacccataaaatacctaagacgaaagttactaggatagccaggggcttgtcttccgggtggcgccgaggccaggaaactgtcctctctaacctatttccccagaggagtctaaattggtcgttcaactaccagcaaaggctaaagagaggctggagcccccaggacagccagaacgctgacactgcaaagggcctctgtccttactggggaagcccagtcctgctcagctgtcttcttcagcaacaaacagaagtccagaaagagaaacagttgtggaggaagctgttgtgatgataatttactgagcacctactatgtgccaggcacgccagccttaccagacaagatccttgggctcatggaattcactttctcgtgggacagacaaacaataacatgtagaaacatatcagctgttggtgagtaccatgcagaaaattaaaataaggcgatggcattgggagtgacttaaggggtcactacgcaatgggatggtcagagacagcctctcaggaggaggtagcattgaagctaaaatgtgaacaacatgaacagatgcagcatagagcactaaagtacaggacgtgcaaaggccctgaggttgaaataagctaaatgcattagactagggggttctcgagtaaggggaattctgccccctaggggacattgcaatgtctagggagacttttttttttttgagacggagtctcgctctgtcactaggctggagtgcagtggcgtgatctcagttactgcaagctctgcctcccaggttcacaccattctcctgcctcagcctcctgagtagctgggactacaggtgtccgccacatgcccggctaattttttgtatttttagtagagacggggtttcaccgtgttagccaggatggtctcgatctcctgacctcatgatctgccctcctcggcttcccaaagtgctgggattacaggcgtgagccaccgcacctggccgagactttttctttttgagatggagccttgctctgttgcccaggctggagcgcagtggcacgatctcggctcactgcaacctctgcttcccgggttcaagcgattctcctgcctcaggcttccgagtagctgggattacaggtacatgccaccgcgccagctaatttttgtatttttagtagagatggggtttcgccatgttggccaggctggtctcgaactcctggcctcaagtaatctgcctgttttggcctctcaaagtgctgggattagaggtgtgagccactgcacccagcctagggatactttttaattgtgacgactttggtggtggtggtgggggtgtgctgttgaaatctagtgggtgggggccggaaatgctttgcaacatcctaaaatgcatgggacaattgccaccacagaggatgatctggcctcaaatgtttgtcatactgagatggaggaagtctgggagagagactaggaaaaagcctagaggtgaaaggcaaggtcaaagactcttatcctcctgcgatcatcagcaggcagtaaccaagggagcgtggccaggcgctgaagtgaattcgggtccaaggagcctgctgggacccaggaaaacgagagaaggaacagaaattgtggtggaggcaaattcaagatcagaagattggggaggaggtgctaagagaggtctggagagatgctgggacccagaactggggcctcagtgagatcagcaggctgcagctaaactgtggtatccaggtgagttgtgggaaggtggctggggggccgggctgggtttatgggggcggggtccgtggaggagagggggtctgacccgcactcgctccctgactctgcccttctagctggtgagaaagttctcactctaagctgcagttttctcatctgttgaatggtgacgctcaactctatttactgggcctttactgctgagaaaataattaactctggctgcccgtggtggctcatgcctctaatcccagcactttgggaggctgaggcaggaggatggcttgaggccaagagttcaagaacagcctgagcaacacagtgagactcccgtccctacaaaaaataaaaaacttaagcctagcatggtggcacatgcctatagttccagctacttgagacgccgaggcaggaggatggtttgagtccaggagttcaaggctgcagtgagctatgatcatgtcactgcactctaatctgggcaatggagtgagaccctgtctcttgaaaaaaacaacaacaacaacaacaactaaaaaactagctaggcatggtggtgtgtgcctgttaatcccagctactcaggaggctgaggtgggaggatcacttgaggacaggagatggaggctgcagtgagccacaatagtgccactgcactccagcctgggcgacagagcaagacttgactttttttttttttgagacggtcttgctctgtcacccaggatggagtgcaatggtgcgatctcagctcactgcaatgtccgtttcctgggttcaaacaattctcctgcctcagcctccctgagtagctgggattacaggcatgaaccatcacgcccagctaattttgtatttttagtagaggcggggtttctccatgttggccaggctggtctcaaactcctgacctcaggcgatccgcccaccttggcctcccaaagtgctgggattacagatgtgagccactgtgcctggccgaccctcactcttaaaaaagaattaactcagcaggcctgagttgtccataccccacacattaaagctgtagctcttgacctgctcctgggaagtgacctctaagcccttggaatgggataagggtgtctttgtttacctggagagccttggctcacactagatactaacaacatgacttagagagggagctttaagtcacgtgatattggttgacctctggaggggctggggattaaggtcagctatgctggtggtcaatcatgtctacgtgaccaactcccaataaaaaccccggacaccaaggctcaggagagctttcctagttggtggcaaactgttcatgttgtcacacatcactgctgggagatttaagtgctggccatacaacttcactgggaggggacgactgaaatctcacacctggtctcttctggaccctgccttggatgcctcttcctgtgcctgatcttattttattttttgaggcagagtctctctctgttgcccagtggtggctcactgcagcctcaacctcctgcgctcaagtgattctcccatctcagcctcccaagtagctaggaccgcagacacgaatcaccatgtccagctgatttttttgctgttgttgagatagggtctcgctctgttgtccaggctggggtacagtgttgcgatcttggctcactgcaacttctgcctcccaggctcaagtggtcctctcacctcagccttgtgaatagctgggactacaggtgtgcaccaccacatctggctaatttttaaattttttgtagaaatggggtttcaccatgttgcccaggctggtcttgaacccttggactcccaaagtgctgggattacaggcgtgagccaccaagtctggccctggataatttttttattttgtagagacactgtctccctgtgttgcccaggctggtcttgaactcctgggctcaagcaatccccacctcagcctctcaaagtgccgagattacaggcatgagccactgtgcctggccccttggctgattttaatttatatccattcatcataacctatgagtacctattttacagctttttctgttttgttttgttttgttttgttttgttttgttttgttttgagatggactgtccctctgttgccaaggctgggtgtggtgtgatctcagctcactgcaacctctacctccttggttcaagcgattctcgtgtctgagccccccacgtagctgggattacagacgtgcaccgtcatgcccggctaatttttgtatttttagtagagacggggtttcaccatgttggccgcgctggtctccgactcctaacctcaagtgatcggcccgccttggcctcccaaagtcctgggattacaggcgtgagccatctcgcctgggctatgacaccatttttaaattctctgagtcctaaggaatcatggagcttgagggtgctcttggggaatccctcaatggcagagtctgtcctgggtggacaaggcagggaagggaagtcaaggcagagaggatagtaagagcaaagacacaaaggtttgaaaatacagttgacccagtagaatcaatatcactgttttgttgagagctcactaatgctgggcattttatagacctatctcccaaccgccttgttgatgttttgttcaaggtggatattttcggcattaattttgatctgctaacacattgcactacctcatatattgctgcagagacaagcgccctgaatggctcttactttcatttcacagaccatgcggccgatgccctgggagggagaccacttgcttaagtcctccaggagggcgatggaggagccggcattccaaccaggctcacggatgccaaggtatacgcgtgttctctctgcctccagcggtggtttgctactgttgtgaagaggttgggcaggattcaggtcgccagggcattttcaataatgtcagatcatggctggacgtggggcctcacacctgtaatatcagcactttgggaggctcaggtgggaggatcgtttgttggcaggagcctgccaagttccagccttgaactcaacccagtgagaccccatttctacaaaaaaaatatttttttttgagacgaagtttcgctcctattgcccaggctggagtgtaatggcgccatcttggctcatgcaacctctgcctcccaggttcgagtaattctcctgcctcagcctcccaagtagctgggactacaggcatgtgacaccatacccagctaattttttgtatttttagtagagatggggtttcaccatgttggccaggctggtctggaactcctgacctcaggtggtccacccacctcgacctcccaaagtgctgggattacaggcgtgagccactatgcctagccaaaaatttttatttattttttatttttttattttttgagacggggtctcactctgtcgcccaggctggagtgcagtggtatgatcttggctcactgcaacctctctgcctcccaggttcacgcaattcccatgcctcagcctctcgaatagctgggactacaggcgtgcaccaccatggccagctaatttttgtatttttagtagaagcaaggttggccaggctgatcctagactcctaggctcaaatgattcgcctgtcttggactcccaaagtgctgggattataggcatgatccactgggcccagactctacacaaatttttttttttttaattaaccagacgtgatggtgcacacctgtagtcccagctacttgggaggctgagatgggaggatcacttgagcccaggagatcgaggctacagtgagctatgatcacaccactgcactccagcctgggtggcagagcaagactctgtatcacctaacaacaaacctcctgcaggcaaagataactagctagagtttatttatttatttaattttattgttcatttatttatttatttatttttgagatggagtctccctctgtcactcaggctggaatgcagtggcatgattttggctcacttcaacctccgcctcccaggttcaagcgatgcttccgcctcagcctcccaagtagctgggactacaggggctcaggaccatgcctggcttatttctgtatttttagtagagatggggtttcaccatgttggccaggctggtcttgaactcatgacctcaagtgatccatctaccttggcctcccaaagcggtgggattacaggcacgtgattgtagctcacagcagccttgaactcttgggctcatgcaatcctcccatctcagcctcccaagtagctgggacaacaggcaggcaccatcatgccatagctacattgttttttttttgtttgtttttttttgctttttttttagacagagtttcattcttgttgcccaggctggagtgcagtggcacgatcttggctcactgcaacctctgcctcccaggttcaagtgattctcctgcctcagcctccggagtagctaggattacaggcatgcaccaccaaacccggctaattttgtatttttagaagagacagggtttctccacattggtcaggctggtctcgaactcttgacctcaggtgatctgcccacctcggcctcccaaagtgctgggattacaggcgtgagccacagctcctggcccatggctctatttttaaaaaacttttttttgcagagatgagggctcactgtgttgccctggctggccttgaactgctggctcaagagatcctcctgccctggcctctggaatagctgggattactggaacaagccattgtgctcagctactagaattgattttaaactgttttctttctttttttcttttttcttttgagatggtgtcttgctgtgtcaccaggctggagtgcagtggtgtgatcttagttcactgcaacctccacctcctgagttcaagcgattctcctgcctcagcctcccaagtagctgggattacaggcctgcgccaccacacctggctaatttttgtatttttcatagagacagggtttcaccatgttggccaggctggtttgaactcctaacctcaagtgatccacccacctcggcctcccaaagtgctgggattataggtgtgagccactgcacctggcctaaaactggtttctcagtttttcaacactgctgacaactgggaacagatcattctttgtgggggcttcctgggcattgttagatgttgagcagcatccctggtctccacccacgtgatgccagtagcatcctccagtcgtggcaactggaaaggtctccagacattgcaagtgtcccctgggggctgaatggtccccaagtgagaactgctggttgaaatagtatgtgcggtgcctggacgtggaaggactttgcctcgtgggagggggtgggaagggcagaatggggtgggactttcgtcaagcggttgtctttcttgtctgggctgtggggctgggcatggctcccagcctctcctctgcacacctgggctcaggctcaacttacacgggtaggccccaggggacccaggtgttcaagaggttggctggtccccgggccccaatgcccagcactgggaaaccatagttgctatggtgactactgcgctctgaggacgaggagctgggaagaggactcccgtgcctagaggagccaacatccagaggtcttggcggggaggccactgtctaatatccctccatgagtgcttgcagaccaaggaaagcagtggagaggagctggttcagctccccagaggcactggaggtggtgggggctgcaggtcactgggggagcctcggaaggtgaaactggctccccgttcctgatggccctgcccggctggcctaccaggaaggctgcctggctgctggcgtgaggtctctgagccccacgccctttccaggggaagggtcatcttggtgggtgggcggcaatgagcgtgggccctctcagcccgagtacccgccggcggcttctgcggggtgaagccggccccctcccagcacctccacccagcggtgtgaccatcttcatcagttccacagtctcaggtaaggtgcagggtatggatgggggctcagaggcaggttggcacgctcaggcggtgtcagggcaatgggcacagctcatggagtcctttaagagacctagacgtgaaccaagtactgtgtttcacgcctgtaatcccagcactttgggaggctgaggcgggtggatcacttgaggtcaagagttgaagaccaacctgggcaacatggcgaaaccctgtctctactaaaaatacaaaaaattagctgggcgtagtggtgggtgcctgtaatcccagctacttgagaggctgaggcaggagaatccctgaacctgggaggcagaggttgcagtgagccaagatcgcgccatagcactccagcctgagcaacagagcaagactctgtctcaagaaacaaaataaaccaaaaactcaaaaaggagatattagataatagcatgcagctacacagcactgcctaactccacattcagtgaagtcagttggcaacttgatattaaccagggtggagcatttaaaccacggaaattggcagaaaatacaaatcggatttaaaaaaatttgttttggagaacagagtattatggaacatttgctgggtcactgctctttttttttttttttttttctgagatggagtctcactctgtcgcccaggctggagtgcagtggtgcgatctggactcactattacctctgtctcccaggttcaagggattctcctgcctcagcctcctgagcagctgagattacagccacctgccaccatgtctgactaatttttgtatttttagtagagatggggtttcaccatgctgaccaggctggtgtcaaactcctgacctcaggtcatctgccccactcagcctcccaaagtgctgggattacaggcgtgagccaccatgcctggccacaccactccatgtatatgtgctctcatagaaattacatcctggttcggggaatggacacataaattaagtaattgcaggccgggtgcagtggctcacacctgtaatcccagcactttgggaggccgaggcgggcgaatcacgaggtcaggagattgagaccatcctggctaacacagtgaaaccctgtctctactaaaaatacaaaaaattagctaggcgtggtggcgggcgcctgtagccccagctgctcgggaggctgaggcaagagaatggcgtgaacccaggaggcggagcttgcagcgagccgagatcatgccactgcactccagcctgggcaacagagcatgactccatctcaaaaaaaaaaaaaaaaaaaaataagtaattgcagcttgtgggccaggtgtggtggttcacacctgcaatcccagcacattgggaggccgaggtgggagaattgggaaacctctatgatgtgaatgcagctcaggtagtgactcatgtgggagcctcctggaccctctgtttcctcctcgagaagccagactgagaacccaacttgatagagttgctgtgagtggcatacgatgttacaactaatatttatgaccaatgtactgtgtgtcaggcttaaaaactgccagaaccttgccacagctgcatggccctgtgtgaccggaccctgctcacctccccaaccttatctcatgtggtcactcccttgtctacctgtcatatccacaccagaatccatagatccgggaacccacaaggccctggggcccatatcaggactatcactctcacggttccctcttctccttcttattctgatcctttgggtctcagtgcaaacaccccgtcttcagggagcccttctctgcccctcgatgtaaagtagatttgtccctctgaagtgggcagattgcttgagctcaggagttcaagaccagcctgagcaacatggcgaggccccatctttacaaaaagtaaaaaaaaaaaaaaaataggctgggtgcagtggctcacacctgtaatcccggtactttagggggccgaggcacctgaggtgaggagtttgagaccagcgtggccaacatggtgaaaccccgtctctactaaaaatacaaaaattagcccagtgtggtggtgtgcgcctgtaatcccagctactcaggaggctgaggcaggagaatcccttgaatctggtaggcggaggttgcagtgagccgagattgtgccactgcattcaagcctgggcacagagcgagactctgtctcaaaaaataaaaaaagagaaaagaaaagaaagagagagagaaggaaggaaggaaggaaggaaggaaagaaggaaaagaaagaaagatttgtccctgttattctctagcccagcccacccgtgtgttttcaatagcactcttcacaaactgcaagtactttttaaaactatttatgggccgggcgcagtggctcacgcctgtgatcccagcactttgggaggccgaggtgggcagatcacaaggtcaggagattgaaaccatcctggccaacatgatgaaaccccatctctactaaaacacaaaaaattagccaggtgtggtggtgcacgcctgtaatcccagctacttgggaggctgaggcaggggaattgcttgaacccaggaggcagaggttgcagtgagctgagatcacgccactgcactccagcctggtgacagagtaagacttcgtctcaaaaaacaaactaacaaaaaaacaaaaaaaaaacccaaaatctatttatgtatttatttattgtgccccttggttaagcataaggggtacaatggcaaacaagatataatccactggtcacagtggctcactcctgtaatcccagtgctttgagaggccaaagcaattggattgcttgagcctaggagtctgaggccagcctagaaaacatagtgagactccttctctacaaaaaatttaaaaaaatatatatggctgtggtggtgcccctctataatcccagctactcaggaggctgaggtgggaggattgactgatgctaggagtttgaggttacagtgagctatgattgcaccactgccctccagcctgggtgatggagtgagacctgtcccttaaaaaacatttttttaaaaatatatacagggctgggtatggtggctcatgtctgtaatcccaacactttgggaggctgaggtgggaagatggcttgagtccaggagttcaagaccagcctaggaaacataaggagactccacaaaataaataaaataactgcctattgcgattttttttatttttctttctttctttttttttttttttttgagatggtggcagcagatgaggctttagccgcaggccaggcgcagtggctcacgcctgtaatcccaacactttgggaggcagaggagagagaatctcttgaggccaggaactcgagaccagcctgggcaacatagcgagatcccattctccacaaaaaaggggaaaaaagacaaaagtaaatcaataaaataaaagcagagctatgaggctgggaagagttctgagtcctttccactaataccctccatgcccttccttgcagatatggatgcagagagggaagccctgcagagcactgcctaccctgaagtgccagaccttctgccagaggcacggcttgatgtttgaggtaactggaagtcactccgggctccatgctttttttatttttttttgacacgtagttcttgctctgtcgccaggctggagtgcagtggtgcgatctcggctcactgcaacctctgcctcccgggttcaagcgattctcctgcctcagcctcctgagtagctgggactacaggcgtgcgccaccacgcccagctaatttttgtatttttagtagagacggggtttcaccatgttggccaggatggtcttgatctcttgaccttgtgatctgcccgcctcggcctcccaaaatgctgggattacaggcgtgagccactgagcccagccccatgcttttttttttttgagacagagtctcgctctgccacccaggctggagtgcaatggtgcaatctcagctcactgcaaccttggcctccagggttcaagcgattctctcgcctcagcctcctgagtagctgggattacaggtgcccgccaccacgcccctctatccatactcttttaatgctttactgttgagttttaaaattcacagtgatttttaaacaaaggtcccacatgttctttttgcaccgagccccgtagattctgtagttggtcctggagatctggccctggagataaaaatccttgggactataaaaaggcaggtgggactgggcgcggtggctgacacctgtaatcccagcactttgggaggcaaaggcgggcagatcgcttgaggtcagaaactcgagactagcctaggcaacatgatgaaactctgtctctactaaaaatataaaaattagccgggcgtggtggctcatgcctgtagtcccagctactcaggaggctgaggcaggagaatcgccagaacttgggaagcagagattgcagtgagctgagatcaagccactgtactccagcctgggtgacagagtgagactccgtctcaaaaaaaaaaaaaaaaaaggcagatggaggggttacagccatgtgcaccgtgcttggttagcatggcaggtggtgtagaaaagtgagtaggagtgaatgcttttgaacacagattcatcgctgtgtcccttgcagtgtgaccttggacatgtcatttaactgtctgttgttgttgctgctgtttttgtcttgccttcagagcttcctggccctcttcgtactgggcttcaggaggagtataagagggctttgcgatatgggggatgggcatggaggttggacatgcctttttctagaacgctgatggtgtacctgtttggcacagtcccaaaacagtaggagcccctaatgctgtctccttgtaccaatccctggctagggaatttttttttttttttcagatgaggtccagtggatgacagagcaagacttcatctcaaaaaaaaaaaaaaagaaaaagtgaaaaagtgcagtggtgtgatctcacagctcactgcaaccttgagcttctgggctcaagggatcctcctgtctcagccttctgaggagctgaaactacagacatgcagcgctatccctggctaaccggggatgtttctgcctgcacatttccctgtggaaactgatgaacatctttggagtctcagcttaacttgagggctgcctccttgctgcttatgagaatgattcattgcaccaaagtcccatttggttaaaagatgaggccgggcacagtggctaacacctgtattcccagtgctttgggaggccaaggcaggaggattgctggaggccaggagtttgataccggtctgggtaatataacaagatcccgtctctataaaattaaaaaaatgagctgggtgtggtgacgcccacctgtagtcccagctactggggaggctgaggtgggaggatcacttgaacccaggagtttgaggctgcagtgagctgtgatggagccactgcactctagcctgggtgccagattgggatgctgtctttaaaaaaaaaaaaatctgggccgggcgaagtggctcatgcctgtaatcccagcactttgggaggccaaggcgggtagatcacctgaggccaggagttcgagaccagcctggccaacatggtgaaaccccctctctactaaaaatacaaaaattacccagatgtggtgacacgcacctgtaatcccagctactcgggaggctggggcaggagaattgcttgaacctgggaggtggtggttgcagtgagccgagataacgccactgcactccagcctaggcaacagaatgagattctgtctcaaaaaaaaaaaaaaaatcaagtggctctttgggtaaaaaagaaaagaaaaggaaaaagatgcatgatcgttatggtttgtatatttattactaagaaagaagcagtgctggaaattccactctgcccaccattgatcatgagacatagttcaatgtcaaaggcactatggaagcatcagcactgagagctgatgaaatggtcaagcttttctgtttaatgcccatgcccgtcctctgacgcggatgctgtcaacatcctccacacgcacatcgggagacggcggtccctccagaagcacaagctccttccagaggctggctcctgaccccttttcctttcctgctcctctaactcattgttcctccccctttcttcctccagtcacattgagtactgctggcctctcaccacttgtcttaagaatctatgtgtctttctctcggtgctaaagaattcagggaggcagggactgttccgagttgtctttgtctccctgtcaccccagccttccacagggtcagctttgcctacctgaactgagctgttctgcccagcctccccatggcgagcaggcacaaatgaactgcaagcgtgcggttgccaaggagaccttggtacgtccagtgctggccaaactaaacaccctcctttgcaaggaaagctttgtgaacaagtgtggacacgtccttgctttcaaagcaacagtttgaaaatggccaagttccttttttaaaaaagcttttctgtcagggcgaggtggctcatgcctgtaatcccagcactctgggaggccgagacaggcagatcacgaggtcaggagattgagaccatcctggctaacacggtgaaaccccatctctactaaaaaatgcaaaaaattagccgggcatgtagtcccagctactccggaggctgaggcaggagaatggcgtgaacccgggaggcggagcttgcagtgagccaagattgcgccactgcactccagcctgggtgatagagcaagactccatctcaaaaaaaaaaaaaagattttctttctttttttttttcttttttctttttctgtttttcttgcaacagggtgtcgctctgtcacccaggctggagtgcaggcatgcaatcacagctcactgcagctttctgggctcaggtgatcctcctgtctcagcctctcaagtatctgagactacaggcacacaccactacacctggctatttatttatttatttatttatttatttattgtagacacaatgtctccctatattgttcaggctggtctcaaactcccggcctcaagagatcctcctccctcagcctcccatagtgctgggattataggggtaagccactttgccctgcctctgttctaatttttttattttaattaacttgcttttttatttcttaatttttatttttttagagatgaggtcttgctacattgcccaacctggtcttgaactcctgggttcaagcaatcctcatgcttcagcctccagagtagctgggattataggcacatgccaccgtgcccgactaaatgtttataaataaacttctgaatttggaatttaggcttacaggaaacgcatggacagtacggagttcccatacaccccacactctgtgtctcctaacgttttacctaaccacagcacaaccaactatgttgttacaactatgaaatgaactttgaggacaggtgcagtagctcgtgcctgtaatcctaacattttgggaggctgaggcagacagttcacttgagatcaggagtttgagaccagcctggccaacatagcaaaactttatctctaataaagatacaaaaaaattagccaggcgtggtggtgcacgcctgtaatcccagctactcgggaggctgaggcaggagaattgcttgaactcgggaggcggaggttgtggtgagctgagagtgcaccactaagctccagcctgggtgacagagcaagactctgtccccctgaccaaaaaaaaaaagaaagaaagaaagaaagaaatcagtctgggggcagtggctcatgcctgtaatcccagcattttgggaagccgaggtgggtggatcacctgaggtcaagagttcgagaccagcctggccaatatggtgaaaccttatctctactaaaaatacaaaaaattagccaggcatggtggtgtgcgcctgtagttccagctactcaggagactgaggcataagaatcgcttgaacccattaggcaaaatttacaatgagccaagatcatgccactggaaggaaggaaggaaggaaggaaggaaggaaggaaagaaggaaggaaggaaggaaggaaggaaggaaggaaggaggaaggaaggaaggaaggaaggaaggaaggattttccagtgagacaagattgcgccactgcactctagcctgggtgacatagcaggactccaactcaaaaaaaaaaaaaaagataaatcaacattggtacatgactgttaacctcctgactttattcaaatgttgccagctcttctatctaagtcttttctggtgaagaaccccatccagggtaccccattgcatttcgttgtcttattgccctagtctcctctggtctgtgtcaatttctcagtcaccttatttctcatgaccttggcagtctttttctttccttctttccttctttccttccttccttctttccttccttccttcctaccttcctctctctctttcttttgacagagcctggctctgctgtccaggctggcatgcagtagtacaataagagctcactgcaacctctgccttgtgggctcaattgatcctcctacctcagcctcccgagtagctgggactacaggtgcccaccaccatgcttggctttgactggcagggcatcttgaagaacgcccttccctctagtctgggtctgtctgttatttttctcatgattatactgaggttatgaatttggttcaagttcttttaatccagacatccccctacaggaagaggctgtcaaaaatttttgaaagaaactttctgctttgtcaaaagggattgaaaaaacaaatcacctgtcatgccacctctctgacaaacttgtgtttctatttcccaggtcgttgatctgaggtggggtattcggaacattgaagccactgaccacttgaccacagaactctgcttggaggaggttgaccggtgttggaaaacatccatagggccagcttttgttgtgagtgtcttgggaggaatgggttagctcttactcctccaggatatgccccctgctttctagacaaactgatcagcagagggaagtaggtaccgtttctgctttcgtaccttatccctatggcctgcctgtggcagacattactaatcaatcacagaactctttctgcagagctgaatgggatccagacattagcagtcaaatggaagcagcaggtggcttggagagtagaatgttgaagccagaaggaatcttggaatttgatctggactttctcccaccttccccaccccctccactttatgtctatagaactttgggatcctggaaagccatggaaaaggtggaaacccacagggtcttgggatattttttttcctccatgtgcccactggtttcaggtcgtggggacttctcccctctctcttccaattgcaccccttctatcaaaaaatcaatctccagtccacaattaatggttttggctattaaaattgaatgatattcctgagtcttttttctttttcttttttgagacagagtctcaaaaaagcccaggctagagtgcagtggcaagatcatggctcactacagccttgaactcctgggcttctgatctccctgccttgttctcccaagtagctgggactacaggtgtgtgccgccacagttggctagtatttttttggaaatatggggtctcactatgttgcccaggctggtcttgaactcctaggcacaagtgatcctcccaccttggcctcccaaagttctgggattacaggcataagccaatgcacctggtctagttttaagtttttttttttttttgagatgggtcttgctatgttgcccaggctggcctgagtcctaatttattacatcgagttccagatacatccaagaacgatcacattttccttagaaattctagagcagggggccgggcgtggtggctcacacctgtaatcccagcactttgggaggccaaggtgggtggatcatgaagtcaggagattgagaccagcctgggcaacatagtgaagtcccatatctactaaaaaattagctgggcatggtggcacgtgcctgtaatcccagctacttgggaggctgaggcaggagaattgcttgaacctgggaggcagaggttgcagtgagccgagatcatgccactgtactccagcctgggcgacagagcaagactctatctcgaaaagaaaagaaaagaaaagaaaagaaaagaaaagaaaagaaaagaaattctagagcagaggccaacaagctatagcctgaaaggcaagtgtggcctgctgcctgtctttgtaagtaaagctttattggcacacagccatgtccacttgtttacacattgtttagccctgctttcaagctataatggcagagtttagtcgttctgacagagaccatctggcctgtaaagccaaaagtattgactgtctgactttttccaggagaaatgtgctgatccctgtcctggacagtaaagagggaaaaagtaaagaaaagtaccatggccaggtatggtggctcactcctgtaatctctgcattttgggaggctgaggcaggtggacaatttgaggtcaggagtttgagagcagcctgggcaacatggtgaaaccccatctctactaaaaatacacaaattagccagacgtggtggcacatgcctgtgatcccagctacttgggaagctgaggcaggataatcatttgaaactgggaggcagaggttggagtgagccgagattgtgccactgcattccagactgcgcaacagacggagactctgtcaaaaaaaaaaaaaaaaaaggagaaggtgagggccagagagatattctattttctgagatctattttctgagacctaaagtgtcccaacattataacgaaagactgtaacaagggctttgggaattatgagccaggaataatgggcaaaacatatatatataatctatatataatatatatattatatatatataatataatgatatataatatataatatataataacatataacatactattatatgtataatatataatgtatacattatatattatatataatacattatctataatatataatacattatatattatatatatatatatttcactcctttttctttgagacaaggtcttgctatgttgcccaggctggttttgaactcccggactgaagcaatcctccagccttagcctcctgggtagctgggattacagttattcttttgatctacacttctattgtaatttggtgccactctgttttatttattactgctttaaaatatatcctaatgtttggaaaactctacattctgttgtaaatctcctaaatttccagtctcctaagtttaatttttcaaaggagcccaatgatcattttaatgagtttccaagaaaaaaaaaaaggagagagaggctgaccatggtggctcatgcctgtaatcccgcacttcaggaggctgagatgagaggatcacttgagcccaggagttcaagaccagcttgagtaacatagtgagaccctatctctaccaaaaaaaaaaaaaaaaaaaaaaaaaattatttttttaaggaagaaagggaaaagaagggagacaaagaactccaggaggaatctgattttgcaacccaaattgcaggcagccaaaagcacagtgcagctttctgattgcacagagaacctaggggtgatctctgagcttctctggggcctgaccaaccggccctgggaccttccagaaaggccctatggccagctgagctggacttccttcctgcttccatcttgaaccaggcatcacccctctactgcccaagagccacagcatcattctgctccatgactctgatttgtgggggcgccttccacaaaaatcagagatgtgctggaggcccttggagaggtgtctctctggtaaataagtcattaggcagcaccgaggccggggacagctccccatggcacttccttttagagaggctcctgtctcttgggctatcagcagccccagtgtctccagagctctgagagttgttcctggtgggaactgttcctatttcccttgctctgatcccacagattggagcagtttgttttgttttgttttttaccacctgtttccttcatataacctctggtctgtggttggcttgtgtcttagtctattttctgttgcttataacagaatccctgaaactgactagttataaagagatgaggctggccaccttggatcacacttgtaatcccagcgctttgagaggctaaagccggaggatcgtgtgatcccaggagttcaagaccagcctgggcaacgtaacaaggccccatctctaaaaaaaaaaaaagaacagttagctggggtggtggctcatgcttgtagtcctagctgctccggaggctgagatgggaaaatcccttgagcccagaagtctgaggtggcagtgaactatgattgtaccgtggcactctggcctgggtgccagaggaagagtctgtctcttaagaaaaaaagaagaaaaaagaatagaaaagaaattattattattattattttgagatggagtctcactctgtcacccaggctggggtgcagtgggaacatgttggctcactgcaacctccatctcctgggttcaagcaattctcctgcctcagcctcctgagtagctgggattacaggtgcccactaccacacctggctaatttttttatatttttagtagagacagggtttcgccatgttggccaggctgctcttgaactcctgacctcaggtgatccacccacctcggcctccaaaagtgctgggattacaggcgtgagccactgcgcccagacttctattttttttttttttttttttttgagatggagttgctccgttacccaggctaactcctaagctcaagtgatctgcccaccctattctcccaaagtgctgggattacaggtgtgagccaccgcactggcccaggttaactcttttggattccggtttgcacctactccaagtgtggttctggcattaagaccaaaattttatggcctcccatgccctacagaatcttgtgcaggggggccgggtgcagtggcttacgcctgtaatccaagcactttgagaggccgaggcaggcggatcacttgaggtcaggaattcaagaccagcctggccaacatggcgaaaccctgtctctactaaaaatacaaaaaattagccagctgtggtcgtgggtgcctataatcccagctacttgggaggctgaggcaggagaatcacttgaatctgggaggcagaggttgcagtgagccaagattgcactattacactccagcctgggtaacaagagtgaaactctgactcaagaaaagaaaagggggaggggacagccttatcccccttcgctgtccctcttcttgccagtgccttagtcgctgtgcccttcctacagcagccatgcttcttcctgccacagggcctttgcacatgctgctccccctgcctgcaagatactctgcctaataaactccttttcatgtttttggtttttttgttttgttttgtttttgtgtttttttttttttttttgagacagtcttactctgtcgcccaggctggagtgcagtggcaccatgtcggttcactgaaacctccctctcctgggttcaagcaattctccttcctcagcctcccaagtagctgggattacaggcacctaccaccatgcccggctaattatttttatatttttaatagatatggggtttcgctatgttggccaggctggtctcgaactcctgacctcaggtgatccacctgcctcggcctcccaaagtgctgggattacaggcatgagctaccatgcctggctcttttcatgtcttattctgcagctcaggtgaatttccctgactccccaggctacgtacgacccatgttttaccctttcttcctagcactctaacagctgccatttgaccttggtctgattctagattgatgcctgcctctttggctaagactccaaggttggctgggcccggtggctcctgcctgtaatcccagaacgttgggaggctgaggtgggcagattatttgaggtcaggagtttgagaccagtctggccaacatggtgaaacccagtctctactaaaaatacaaaaattagccgggtgtggtggtgggcgcctgtagtcccagctactggggaggtagaggttgcagtgagctgagattgtaccactgcacgccagcctgggtgacagagtgaaactgtgtctcaaaaaaagtaaataggccaggcgcagtggctcatgcctgtaatcccaacactttgggaggctgaagcaggcggatcacctgagatcaagaattcgagaccagcctggccaacatggcgaaaccctgtctctactaaaaatataaaaattagccaggcgtggtggctcacgcctgtaatcccagctactcaggaggctgaggccggagaatcacttgaactcaggaggcagaggttgcagtgatctgagattgtgccactgcactccagcctgggcgacagagggagattccatctcaaaaaaataaaataaataataaataaataaatatctgtgggctgactgtactcagaatgtggcgctttcatactgagctctgatctctccctttctccgtggtcagcccttaagccatcctgtgaccttggactaactctgttccatccccaggcccctgtttccatgataataaaaggggagagctggacttagggtcctcttagccctgcttcacctctgattctccctggaaggaccagaactagaatggagaaccaccacaagatttaatttaaatcttaattatcgagataaattgtatatatattttgagacggagtttcgctcttgttgcccaggctggagtgcaatggcgcaatctcggctcaccacaacctccgcctccagggttcaagcgattctcttgcctcaggctcccgagcagctgggactacaggcatgtgccaccatgcctggctatttttaaaaaaattttttgtagagacagggtctcactatgttgcctattattattattattattattattattattattattattattttatttgagacagagtcttgctctgtcgcccaggctggagtgtagtggtgccatcttggctcactgcaaccttcgcctcccggcttcaagcaagtctcctgcctcagcctccctagtagctgggattacacctgcacgccaccatgcctggctaatttttgtatttttagtaggggtttcaccatgttggccagactggtctcgaactcctcttgacctcaaatgatctgcccacctcagccttccaaagtgttgagattacaggcgtgagccaccttgcctggccccattatttgtttctttagagacagggtctcactctgtcccccaggctggagtgcagtggtgcgatcacagctcactgcagcctcgaactcctgagctcaagcggtcctccagcctcagcctcctgagtacctgagactacagatgcacacccccacaccctgataatttttaatttttatagatatggggtctcactatgttgcccagctagtctctaactcctgggctcaagagatcctcctgccttggcctcccaaagtgttgggattacaggcgtgagccaccatgcctagcctaggggacaattctttattgaccctcgtgacttctggtggctccaggctataagggcggtcaacttcacctccatcttctcagagtgctggttggattgaagaattgaattgacataaaattgattaacaggaaaagaaaccatacatatttatttatttatttattagtttgtttatttatttatttattttgagacagagtcttactctgttgcccaggctggactgcggtggcaccatgtcggttcactgaaacctccctctcccgggttcaagcaattctcctgcctcagcctcccaagtagctgggattacaggcacctaccactacgcccagctaatttttatatttttagtagatatgggatttcactatgttggccaggccagtcttgaactcctgacctcaggtaatccacccgccttggcctcccaaagtgctgggattacaggtgtgagccaccgcgcctggccgatatacatttattaatacaagtgttttacatggcataagaaccctcataaggaaataaggacccacaaaagcagctagagtcatttacttatatattgaattggagaaagaatagtaaattgtggctggggacagtggctcacgacagtaatcccagcactttgtgaggctgagatgagaggatcccttgagtacaggagttcaataccagcccgggtaatgtagtgagaccctatctgtaccgaaaataaaaacttaaaaattagctgggtatggtggcatgtgattgtggtccaagtgggaggatcacttaaacccaggaggttgaggctgcagtgagccatggttgtaccaccgcactccagcctgggcgacagagcaagaccttgtctgaagaaaaaaagtgagatttgaatctgtgacttcctctctgccaggccctcatcggtgatcagtacggcccctgtctgattccctcgcggatcgatgagaaggagtgggaggtattgagggaccatctgactgccaggccaagtgacctggagctggtggcacgatacttccagagggacgagaatgcgtttcctcccacctacgtcctgcaggcaccaggtactggggaggcctgtgaaccagaggaggccaccttaacttctgtcctacgctctggagcccaggaggcccggaggctggggctcatcacccaggagcagtggcagcactaccaccggtcaggtgaggccgcagggactcccctctggagacccacaagaaactgaccacgtgttcagaatatccatcccctgttggcaaaaatgcaacagtctgcatttcttgcaaatgccaaaccagtcaacctctggtccctcggctctgagaaaggctgttttactgatccaagatagttcagccatgttcctgatcaatcttggtctcaggatcttcctctcctcgctggctctttcttcttgtctcccagggaggttcctggcacaggggccgtattagtctgttctcatgccactaataaaggcatacttgaggctgggtaatttacaaaggaaagaggtttaatggactcacaattccacatggctggggaggcctcacaatcatggctgaaggcaaaggagaagcaaagaggcacatcttacatggtggcaggtaagacagagtgagagccaagcgaaaggggaaattccttataaaaccatcagatcttgtgagacttattcactaccacgagaacagtatgggggaaactatcccccatgattcaattatctcccaccaggtccctcccacagcacgtgtgaattatgggagctacaattcaagatgagatttgggtgaagacacagccaaaccatatcagggggagcaatgcagggcgactaccatcccagtttgcctgggacggaggggttcctaggatgcaggatttgtattactaaaatctgacaggctgagcccagtagtgcctacctgtaatcccagaattttggaaggccgaggcaggagaatcacttgagttcaggagttcgagaccagcctgggcaatatagtgacacctcatctctacaaaaaaaaaaaaaaacttttaaaaatttgccaaatgtggtagtgcatgcctgtagtcccagccactcaggaggctgaggcaggaggattgcttgagcccaggaggcagaggctgtggtaagccaagatcatgccactgcactccagccggggttacagagagagacctgtctcaaaaaacaaaaacaaaaacaaaaacaaaattagctaggtatagtggtgcatgcctgtagccccagctactcaggaggctgagatgagaggatcgctggagcccgggagttggaggctgcattgagctatgatcttgccactgcactccagcatgggtgacagagtgagaccctgtctctaaataaataaattaattaattaaataaaatacagtctacccttgaacaacatagtgtttagggactctaactccttgcacagtcgaaaatctgtgtataacttttgactcccccaaaacgtaactactaatagcccaccaatcacataaattgttgaccaggtgtggtggctcatgcctgtaatcccagcactttgggagtctgaggtgggtggattacttgagccccgagttggagaccagtctgggcaacatggcaaaacctcacctttatttaaaaaaaaaaaattaaaattagttgggtgtggtggtgcacacctgtagtctcagctactcaggagagtgacgtgggaggattgcgtcagcctaggaggcggagattgcagtgaaccaagattgtaccactgtacttcagtctgggtgacagagtgagaccccgtatcaaacaaacaaacaaagaaacaacataaacagttggccgggtgcggtggctcatgcctgtaatcccagcactttggaaggctgaggcagacggatcacgaggtcaggagttcaagaccagcctggccaaaatagtgaaactctgtctctactaaaattacaaaaattagctgggcatggtggtgcacacctgtagtcccagctactcgggaggctgaggcaggagaatcacttgaacccgggaggcagcggttgtagtgagctgagatcgcaccactgcactccagcctggcagcagagcaagactctgtctaaaaacaaaaaacaaaaaacaacaaaaaaaaacagtcgatgaacacatattttgcatgttctatctatcatatcctgttttcttacaatcaagtaagctagagaaaagaaaatgttattacaaaaatcacaaggaagagaaaatatgtttgctgttgattaaacataagtggatcatcagtcacaaaggtcttcatcctcatcatcttcaccttgagtaggaagaggaggggttggtcttgctgtctcaggggtggcagaggcagaagaaacttgacctgtgtagttcaagcccatgttcttcaatggccaacactgtgtcatgtaacttccacctctgtctagttccaagatattttctttttctttctttttttttttttttgagatggagtcttgctctattgtccaggctggagtgtagtggtgcgatctcagctcactccaacctctgcttcccaggttcaagcaattctcctgcctcagcctcctaagttgctgggattacaggcatgcgccacctcgcctggctaatttttgtatttttagtagagacggggtttccccatgttgctcaggctggtctcgaactcctgacctcttgatcggcccgccttggcctcccaaagtgctgggattacaggtatgagcacccgcgcctggctgacattttctttttatttatttatttatttatttatttatttatttatttaattttttttgagacaaggtcttactctgttgcccaggctggagtgcagtggcacgatcacggctcagtgtggcctccagctcctggggtcaagcaatcctcccacctcagccttcccagtagctgggaccgcagtcacacgccatcacaggtggctaacttattttttgtagagacggggttttgccgttttgcacaggctggtctcgaactcctgagctcaagtgatcgtccagcctctgcctcccaaagtgctgagattacaggcatgaactacacctggccctccaagacattttcatcacctcaaaagaagctctacccattaaacactccccatctcccctctcccagcgcaggcaaccatcaatctgctttctgtctctattaatttgcctgttctggacatttcatgtcaatggaatctcacactacatggccttttgtgtctggcttctctcacttggcatcatatttttgaggttcatccacattttaacacctgtgagtacttcatccatttcaatggccgaatagtatcccattgtgtggaaggaccatattttgtttatccattcatctgttgatggatgtttgttttgatttgttttgtttttgagatggagtctcgctctgttgcacaggctgaagtgcagtgacatgatcttggctcactgcaacctttgcctcccgggttcaagtgattctcctgtcttagcctcttgagtagttgggattacaggcgtgcggcatcacgctgggctaatttttgtatttttagtagtgacaaggtttcaccatgttggccaggctggtctcaaactcctgacttcaggtgatctgcccaccttggcctcccaaagtgctgggattacaggcatgagaccccatgtccagcccgttgatggatgtttggattgtttctgtcttttggctattgtgaatggtgctgttacaagctagggtgtattaatatttgttggagtctctgttttcaggtattttcagcagatacctgggagtggaattgctgggcgtgatagtaactccatgtttcactttttgaggatgacagcattgttttacagtgtgactgctcctcacatgggacctctgtgttgcctaccctgaggggtctttgattaataatggctaaatcaggccgggcgcagtggctcacgcctgtaatcccagcactttgggaggccgaggttgaattgcttgagctcagtagttggagaccagcttgggcaacatagtaagaccccatctctacaaaaaatacaaaaattagccaggcgtgctagtgcatgcctgtaatcccagctactcgggaggctgaggtggaaggatcgcttgagcctaggaggcggaggttgcagtgagctaagatcgcgccactccactccagcctgggtgacagagtgagaccctgtctcaataataataataataagaagaagaataagagtaatggcttaactagtgtaactctgggtgcagtccctggaccagcaagccttggcttgttgcaaatgcaaactccggggccccactcagatctgctgaatcacttctggaggtggggtccagccatgtgggtcttttcgagacccccaggtcagactctggtgcacgttaatcttgagaaccaatgcacatcccccaacaacaggtctcccagcaaccccatttaggtcagctgctgacccaataatgaccacacttccttcccaccttccccactttggcagtcattgagtgggagatagagcggagcctgctgagctcagaggaccgggaacagggagccaccgtcttccttagagagatccaagacctccacaaacacatccttgaagactgcgcccttaggatggtggaccggctcgcggatggctgcctggacgctgatgcccagaaccttctcagcagcctcaaaagtcacatcactgacatgcacccaggggtcctcaagacccaccgcctgccgtggagccgcgacttggtgaaccccaagaacaagactcacgcctgctacctgaaggagctgggtgagcagtttgtggtgagggccaatcaccaggtcctcacacgcctccgtgagctggatacggccggacaggagttggcgtggctctaccaagagatccgccaccacctttggcagagctcggaggtcattcagaccttctgcggacgccaggaactcctggcccggcttgggcagcagctcaggcacgatgacagcaagcagcacacccccctggtactctttgggcccccaggcattggaaagacagccctgatgtgcaagctggctgagcagatgccaaggctgctggggcacaagacagtgaccgtcctgcggctgctggggacgtcacaaatgagctcagatgcccgtggcctgctgaagagcatctgcttccaggtgtgcctggcctatgggctgcccttgccccctgcccaggttctggacgcccacaccagggtggtccagtttttccataccctcctccacactgtctcttgcagaaacttcgagtctctcgtgctcctgctggatgctatggatgacctggactctgtccgccatgctcggagggttccctggctgcctctcaactgccccccgagggtgcacctcatcctctcagcttgctcgggggcactgggggttttggacaccttgcagcgggtgctcctggacccggaggcctactgggaggtgaagcccctttccggaaaccaaggccagcagatgatccaactcctgctggcagctgcaaggaggacgctgagcccggtgcacacagatttgctctgggccagcctcccagagtgtgggaacccagggcggctgaggctggcgtttgaggaagcccggaaatgggcctctttcaccgtgcctgtcccgctggccaccaccgcagaggaagccacgcaccaactctgcacccgcctggagcagacacacgggcagctcctcgtggcccacgtgctgggctacattgtgtcttcccggtaagtctctgtgttttgaaactcttatttatttatttatgttttctttttttatttttagagatggaggtctggctatgtcacccaggctggagtgcagtggtgtgatcatagctcactgcagtctccaactcccaggctcaagtgatcctcacgcctcacctgctgagtagctgggactacgggcatgcaccactgtgcccagcaaaatataatttttttatttttatttttatttttagagataggggtctggctctgtcacccaggctggagtgcagtggcatgatcatagctcactgcagtctccaactcccaggctcaagtgatcctcccatctcagcctgccgagtagggtagctgggactacaggcatgcaccactgtgcccagctaaatacagtttttgtttgtcaactatacctcaaaagctgggaaaataaatacacacatgtaaaagaaagaaaggactgcctacatggttgcttagcctagtaaaagtctcggagctataaattgcaataaactaggccaggcgtggtggctcacacctgtaattccagcactttgggaggccgaggcgggcggatcacccaaggttgggagttggagaccagcctgacaaaacatggagaaactctgtctccactaaaaatacaaaaaattagccaggcgtggtggtgcatgcctgtaatcccagctacttgggaggctgaggtaggagaatcacttgaatccgggaggtggaggttgccgtgagccgagatcacgccattgcactccagcctgggcaacaagagcaaaactcgatctcaaaaaaaaaaaaaaaaatgcaataaacttgggtcatgatagtctggggccattgctcagagatgccagccaggtatggatgaggagtcaaaagtaacaagcatatattgctttttggatatagcaagaaaaagaaagaaagagagagagaaagagggaagaaaggcagacaggaaggaaggagacagaaaggaagagtgaaagaaggaaaggaaggaaggaaggagagagaaagaaaggaagagagaaagaaagagaaaggaaggaaggaaggaagggaggaaggaaggaaagaggcctggcatggtggcttacgcttttaatcgcagcactttgggaggccaaggcaggtggatcacttgaagtcaggaatttgagaccagtctggtcaacatggtgaaacctcatctcaactaagaatacaaaaattagcccggcatggtggcggtcacctgtaatcccagctgcttgggaggctgaggcaggagaatcacttgaacccgggaggcagaggttgcagtgagctgagatagtgccactgtgctccagcctgggcgacaaaggaagactccatctcaaaaagaaagagaaagagaaggaaggaaggaaggaaggaagatagtaagaaagaaaaaaaaagaaggaaagaagagataaaggaaagaaagaaagagaaagagagaaaaagggaaagaaggaaagaggaaagaagaaaggaaggaaagaaaagaagaagggaagaagaagaagaaaaagtgaaaggaaggaaggaaggaaggaagcaaaagcaaaaataacaagcagcagagaggaaggggttaatcagaagcacccaagcagccacactccctcctctgagtttgtcctctgccaattggcagagacgccaaggaacaaaactttgcctttactgcaactggccaacagcaaacactcaaaaccatcatccaaaatgctggacgacatagttttgcctcttctcagttttagggttgttttttttttttctcagcctgtgccatttcagacctttgtcggttaccacaaattcatctagagggtggtggtcaacccaacgaggaggtctttctgcctgtttctttgccagaaatagaaacacattcatgctagtgtaggaaataagagaatatgctgggtgcagtagctcactcctgtaatgccagcgttttgggaggctgaggtgggaggatcacttgaatccaggagtttgagaccagcctagacaacagagtgaggcccctgtctatacaacaattttttttaattagctgagcatggtggtgctactccggaggctgagatgggaggatcacttgagcacaggagttgaagactgcagtaagccataattgtgccactgggcttccttccaatgaagagttagggaaattcaagtctgtcttatagctgactccaggggacatatcccagatttcccgactggcttacactctataagagtacaaatacggcgtggtgtggtggctcacacccgtaatcccagcactttgggaggccaaggtgggagaattacttgagcccaggagttcaagaccagcctgggcaacaaagtgagagcccctgcctcagtgaaaagtaaaaatattagctgggcgtggtggctcacacctgtagtcccagctactcgggaggctgaggcaggaggatttgttgagccaggaggtcatggctgcagtgagctgtgatcatgccactgcactccagtctgggcaacagagcaagaccctgtctccaaaaacagtgcaaataacaactggggcatgttccagaatagaggggtggcccattgggccattctgttgaagttgacttggaggaagtgagttgtcatggaaactgtcataaaaatcagagcagcttctccttccttctccctctggggtcctctctgcacatcaactcctcttgtagactcttccttcggcccctctggaacttcagcttgccttgagccacagttggcatcaggagcccatatttctgtgaccaggtgccatcttactgactttttctttgggtcctaattccaaagtacagggagacagaaatcaaatggcctacttggtcccatatctggtccaattagtaaagccagatctctcacaggggtggcgggggaggtggtttataaagcatgatgataaggtggatgattttggttgctccagttccatgaaaatatgttatgcttacacatcagatccatgtggcaggatggtgagagctttgctcttggagcagacctgagatccttctaggctagaggtcgtcacctcaggatagttctccacgccccccatccccccacaggggacactagacagtgtgtctggaagcatttttggttgtcatgactgagcagggtggtgctcctggtgtctttactgagtggagtccagggatgctgtttaacaccctacagtgcaaaggattgtcctactttagagaatgatccagccccagatgttgatagtgcagagagtaagaaaccttgccttagcctgagagaccctatccattcatccatccatcaatccctccctccctccctccatcatctctatcatccatccatccatccatccatccatccatccatccattcatcaattcgacctttcatccatccattgtctctatcttccatccatctatccatcatctcaatcctccatccttccatccattctctctaaattccatctatccttccatccatcatctctatcttccttttatccatcatctctatcttccatctatccatccatccatccatccatccatccacccatcatctcgatcttccttccatccatcatctctatcatccatccatctattcatctatctatccatcatcttgacctttcatccatccgtccatcatctctatcttccatccatctatccatcatctcgatcttccatccttccgtccattctctctaaatccatctatccatccatccatcatctccatcttccatccatctatccatcatctctatattccatccatccatccacccatcatgtctatcttccatccatccatccatccacccattgtttctatcttctttccatccatcatctctatcatccatccacccatcatctctatcttccatccatctatccatccgtctatccgcccatcatttctatcttcctcccatccatcatctctattttccatccatccatccatccatccatccatccatccatccatccatcatctctatcttccattcatctatccatcatctcgatcttccatccttccacccattctctctaaagtccatctatccttccatccatcatctgtcttccttttatccatcatctctatcttccatccatccatccatccactctattcttccttgcatccatcatctctatcttccatccatccatcatctctagcatccatccatccatccatcatctctatcttccttccatccatcatctctatagccatccatccatccacccacctatcatctctatcatccatccatccatccatccatccatccacacatcatctctatcttccctgcatccatcatctctatcttccatccatccatccattcatccacccatccgtcatatctatctatctatgtctatctctatatatctatatatttctctatgtcccatcgataaatatgtatagtctcaatctatctctatcacttctagtaatctatcattgtatctctctaccatctgtctatacctatctaactctatatctatcccacatctacaaatacatcattttaatctatccacctatttaaatgatctatttatctatcatctctatttctatccatctagtcatttataatcaatcaataaatctctatatctatctctctatttctcatctatatcgatcctgtctatcattaatatctctctctctcttttttggggggggacagggtctcactctcttgacccagactggagtgcactgaagcgatcacagctcgccgcagtcttgacttcttgggctcaagcgatcctcccatctcagccccctctgagtagctgagactacaggtgcatgccaccacacccagttatttatttcttcttttttttctttgagacagagtctcactctgttgcttagcctggaatgcagtggtgcaatctcagctcactgcaacctccgcctcctaggttcaaatgattctcatgtctcagcctctcaagtagctgggattacaggcgtgcaccaccatgcctggctaatttttgtatctttagtagagacagggttttgccatattggccaggctggtctcgaactcctggcctcaaataatctgccaccttggcctcccaaagtgctaggattacaggaatgagccaccacatccagccttatttatttatttatttatttatttatttagtagagatggggtctcactatgttgcccaggctgctctcaaactcctgggctcaagcgatcctcccaccttggcctcccaaagtgctgggattacaggcgtgagccaccgtacctggcctataatctatctctgtatatacagttggctcttgaacaaactgggagttaggggaaccagctgtctcccaacgtacctcaaaattgatgtataacttttgactcccctaaaacttaaatactaatagcctactgttgaccagaagccttaccagtaacataaatggtcgacgaacatgtatttcatatgttctatgtattacagactgtattcctacaacaaaacaaggtagagaaaagaaaatgatagtaagaaaatcataaaggggggctgggcatggtggctcatgcttttaattccagctacttgggaggctgagtacgagaattgcttgaacctgggaggcggaggttgcagtgagcctagatcacgccattgcacttgagcctgggtgacagagcaagactctgcctcaaaaaaatagaaaataataaggaagaaaaatacatgtactattcatgaagtggaagtggatatcacaaaggtcttcatccttgtcatcttcacattgagtaggcagaggaagaggaggaagaggggaggaggagaaggggacttggtcttgctgtctcagagacagcacaggcggaagaaaatccacatataagtggactcatgcagttcaaacctgtgttcttcaagggtcaactatatgtctatctgcctatttatatctatttatctatcatctgtctatttatctttatgtttatctatctctgtatctattgctctatctcttatttatctctccatataatctgtctatctataatctatatgcctatctatacatctgcctgtctatcatgctaccagcatctagtgggtggaggcttgggtggagactgctacacatcctacaataggggtccccatcccccagtaccggtactgctccgtggcctgttaggaaccaggctgcacagcaggaggtgagcagtgggcgaacaagtgaagcttcatctgtatctacagccacttcttgctgctcctcatcactcccattaccacccgagctccccctcttgtcaggtcagcagcatcattagattctcataagagcacaaaccttgttgggaactgcgcatatgagggatctaggttgcttgaaccttatgagaatctaatgcctgatgacctgtcactgtctcccatcacccccagatgggactgtctactttcaggaaaacaagctcagggctcccactgattctacatgatggggagttgtagaattatttcgttatatattgcaatgtaataataatagaaataaagtgtgcaagtgtgatgcacttgatcatcccaaaaccatcacccctaccctggtccgcgggaaaaaaattgtcttccaagaaaccggtccctggtgccaaaaagactggggactgctgccctacaacacacaggacggtccccaccctaaaaaatgatctgaccccaaacatcaaccatgcgagcccaagaaacgctgcactcagcatgccctgtgccctctgggagcctcacttcctcctccgcatggaggggctggttgggagagcatccatcctccaaggctactggaaggaccaatgagatcatactcgccagaataagagttcagaaaaagaggaactagtgcattttcttcttagccctcaacagttttgcttttggcagatgaggaaactgaggcaaagagaaggtacattcctcaccaaggtctcccagctaggctcaaacgcaagcctgatgaccatgcacagccctgttttgcaattcaggctaggcgggtcctctgggagtgccaagtgaggtgcccgctctgaggttcgcattgcttaggggatgtcttcagggatgaagataggctctcaacctagcggttcacccatgaccaggggcacatctcctaggctctgtctgataccatatcatagaattttgcaggccaggtgcagtggctcacgcctaatcccaacactttgggaggctgaggcaggcagatcacctgagatcaggagttgaacagcagcctggccaacatagtgaaaccccatctctactaaaaatacaaaaattagccgggcgtggtggtgcacacctgtagtcccagctacatgggaggctgaggcaggagaatcgcttgaagccaggaggcagagattgcagtgagctgagatggcgccactgaactccaacctaggcaacagagtgagactctgtctcaaaaaaaaaaaaagaattttggaaagagtacagtgttgggtatgacattattaccaatatggtaactacaagccacaaaaactatggaacacttgaaaggtgcttcacacaactcagaaactgaatttaaaactttgaaagatggttcatgcaaccaagaaaccgcattttgaattttattaatttttaaccagtttaactttatttgtatttatttgttcatgtatttatgtatttattttagagacagggcctcactcttttgcccagtctggagtgcagtgatgtaatcacagctcactgcagcctcaacctcctgggctcaagtgatcctcccacctcagcctctagagtagcagggactacaggtgtgtgcccctatgcccagctaatttttaaatttttttgtagagatggggtctccctttgttgcctaggctggtcttgagctctggcctcgagcagtcctcctgcctcagcctcccaaagtgcagggattacaggtgtgagccaccacgcccagcccaattatcctaatttaaagacaagccttggtgggccagggtggagtggggtaggtgcagttggtttctgcattattttccttgagttaccacttccctccctatagtgtctgtctcagaccccttcgaggttgaggagcgggccatttatggttctgtaggtgtgcatgcagaggaaaagattggcactttgggagaccgaggcaggtggatcacgaggtcaggagttggagaccagcttgactaacatggtgaaaccccgtctctactaaaaatgcaaaaattagccaggcgtggtggcgcctgtagtcccagctactcaggagactgaggcaggagaatcgcttgaacccgcgaggcggaggttgcagtgagccgagattgcaccactgcactccaacctgggcgacagagtgaaactctgtctcaaaaaaaaaaaaaaaaaaaaaaaaaaaatcggaaaaggtcttccttggtgggtattgccctaaccgtgcttggtaccttgtgggcgctgtccaaatgctgatcccaggtgatgtgctggacaccgcgcgggtggctgtatccctccctctcttggattctgcatcctccaaatgcagaagacatgagatgtgcctcaaagccccactggtcctcccttcagacacggtctctcggaggcggagctgaaggatgttttgtccctggacgacgaggtcctgcaggatgtgtaccgagattggaccccgcccagcaaggagctgctgcgcttcccgcccctgctgtgggtgcggcttcgtcgggatctgggatactacttggcccggcggcccgtggatggcttcaccctcctggccattgcccacaggtaggtccaggcagcagtggcagcgacactgtctgggtgggaccccaagaatgaggactcactggccgggggtcttctcagtatcagatccttcacttaccattcccagggaatcaagtccagttagaactctgacacaattcacttatttttaaaattgagttgaggctggaagcagtggctcatgcctataatcccagcactttgtggggccagggcaggaggattgctggaggccaggagttggagatcagcctgggcaacgtagcgaggccccatctctacaaaaaaaataagaaaattagctaggtgtgttagcactttgggaggctgaggtggcggatcacctgaggtcaggagtttgagaccagtctgaccaacatggtgaaaccctgtctctattaaaaatacaaaaattagccagacgcggtggcacgtgcctgtaatcccagctgctcgggaggctgaggctggagaatcacttgaacctgggaggcagaggtggcagtgagccaagatcgcaccactgtactccagcctggcaacagagcgagactccatttcaaaaaaaagaaaattagctgggtgtgatggtacacacttgtggtcccagctacttgggaggctgaggtgggaggatcacttgagcccaggagtttgaggccacactgagccgtgactgtaccactgcactccagtctgggtgacagagtgagatcctgtttcaaactaaactaaactagactaaactaaactaaactaaactaaactaggtgaagttcatgaaacataaaattcaccattttattttattttattttattttattttattttattttattttatgtattttgagacagggtctcgcccaggctgcagtacagtggttgtcatcatggctcactgcagcctcaaactcctggactcaagcaaccctcccacctcagcctccggagtagctggaactacaggcatgcaccaccatgcctggctaatttttaaatttttttgtggagatggggtctcaccacattgcccaggctggtctcgagctcctgggctcaagagacacacccacatcggcctcccaaagtgctgggattacaggtgtgagctaccatgcctggccaattcaccacattttattttatttatttaattttattttattattttttgagacagagtcttgctctgttgcccaggctagagtgcagcggcacaatcttggctcactgcaacctctgcctcccaggtttcagcgattctcctgccttagcttcctgagtagctaggtttacaagcatgagccaccacacccagctaatttttgtatttttagtagagacgggtttcaccatgttggccacgctggtctcaaactcctgacctcaggtgatctgcccgccttggcctcccaaagtgctggggttacaggcgtgagccactgtgcccagtcagaattttaaagttgacaattgagtggtattttagtacactcataatgttgcacccctcacctctgtctagttccagaacgttttcatctccccaaaaggagaccctgtccccatcagccgtcactcctcattccccttccctaacccctggcagccactcatctgcttcctgtctctgtggatttgcctgttctgggcatttcagatcaacgaaatctcacactatgtggccttttgtgtctggcttctttcactcagcattatgttctcagggctcatccacattgtagcagggatcagtgcttccttccttttcatggctacataatatttcattgtatggatggaccaggttttgtttatcttcgtctatggatggacacttgcattgtttccacgtttttgctgttgtgaacatgcatgtgtaaggttttgtttgaacacctgttccctttctttctctttctttctttctttccttctttctctttttttccttttttctttttggagtctctctctgttgcccaggctggagtgcagtggcaccacctcagctcactgcaacctccacctgggaggagtgattctcctgcctcagcctcccaagagcacaccaccacgcccagctaatttttgtattcttttttttagtacagacagggtttcaccacgttggccaggctggtcttgaactcctgacctcaggtgatgcacccgcctcagcctcccaaagtgctgggatcacaggcatgagccactgcacccagcctgaacacctgtttcttaattctcggtatatacccaggagtggatttgctgggtcaggtggtaagttattttatgtgtaaattttggaggagctcaaatgttcctctttgaaatgtatgtaaggaaagtaaattgatgtaaggaaaaaaaaaacacggaccaatttagagatagatgtgatgtatcaaatagcacaggtggtcaacagagtggtttaggatggcttgggatttgggaactgcctccaggaagacaagcagccacctttgagcttgatgggtcacccaggtctatcagtctgtataccctctctgtagacagctggtcgaggtggtccgtgagcgctacctgtcaggatccgagagagccaagaggcatggcgtcctggccgacttcttctcagggacctggagccagggtaccaagaagctcatcactctgccacttgtggggaaaccactgaacttggaccgaaaggtgaggtacctgggacccccattccccacctgcaacctccaccctgcctggcattgctcacctccttccttcccctttttgcactcgaaatgtcctcccgacctacttctcctttccgcacagagggcaagatgtcccttctactgtcccccccactcctttttttttttttttttgagacagagtcttactctgtcgcccaggctggagtgcaatggcgtgatctcagctcactgcaacctctgcctcccaggttcaagccattttcctgcctcagcctcccaagtagctgggattacaggcacccgccaccatgcctggctaatttttgtatttttagtagagacggggtttcaccacgttggccatactggtctcgaactcctgcctgggcaacagagagaaactctgtctcaaaaacaaacaaacaaacaaagtacagagttattgtggactcttctccctgatgttaaaatcttatataactgttgtataatgattgcaactaggaaattacacttttaattctttggttatagcttgatgtttctttttctctgtcttccctgctggactggggaggctggaggcaggaccaggctctattctttttttggtgctgccttttctttttccctccctcgcttccttccttccttccttcctgacagagtcttgctctgtcacccaggctggagttcactggcatgatctcaggtcactacagcctctgcctcccaggttcaagcgattctcccactcagcctccctagtacctgggactacaggtgtgtgccactgcacctggctaatttttgtatttttagtagagacggggttttgccatgttggccaggctggtctcgaactcctgatctcaagtgatctgccttggcctcccaaagcactgagattacaggcgtgtaattacaggtgggattaccacacctagcctggtgctgacccttctcttctccccccgagacccattcacaaatcctttcctgtgtgcccagagtccctgcagactcagcttcatcctgcctctccaggacatggtctgagcccctttcattcacctagcctctcagtctcttgccctagtgcatcctcccaaggatgcttctgaccatccaatctgattatgattatgcctcttgtctaaaaccttccatagctccccagtgccctcagtcttgagcctgacctacccagcctgatattcagtgccttcgtgatctgctgcttacaagctccctactctcatttcccacccgcatcccctaacctgacttgtataattcagtcctcccaaactcagcctgctctttcacacctccagacctttgcccatgctgttcccttgccctggaatgccattgttttctgacacattttgccacatagatgcccacttaattctgaggctcagttccgatgcctctgccttcaggaaacattccctattcctcccagaaagtcccatgacctctggctttgattctctgagtcccagatgtcgtcctctgctccagccctgaccaatgggcacatgggggtatgtctgtcttccattgcattctcgtccactccagcactgtctggagcatgaggtgaatgaatgggcttgtgcgtggagtgaatgaatgggtttgtgtccaagctgcagtctcccttctcctctgccaggtggccccgcagcctctgtggttctcacatacggttgcaaacctgcggaagctgaaggagttgccctatcacctgcttcactcgggccgcctggaggagctgaaacaggaggttctgggtaagggctgccccccatctcagaggaccgagcctggtgactgcaccacgctccagtcttctagagcctggggagggtgaagggcaaacatggaaatccttcgttcctcctaaggcagaggttctcacaaggggcaattctacacccaggggatgccttacagtgtccgcagatagttttggttgtcacagctaggggagaaggcactacttgaatctggtgggtggaggccaggaatgctgcttaataccctacagtgcacaggacaccctaccacagaaaataatctagctccaaatgttggtgcatagagtgaaaacccctgccttatcatgagagaccctatctgtctgtctgtctatttgtcagtctgttcatccacctatccatccatccatccatccacccatcttctgtccatccatccatccatccatccatccatccatccatccatctaactatccatttatccacccatccatctatgatctccttattgagccatgagctggttataaccatccatccatccatccatccatccactcatccttctgtctgtccatccatccatccatcattctatctatctatccatgcacccattatatgtccattatctattcattcatctacctttctggtcatccatccatccatccacccatcattctatccatccacccacctatctttctgtttgtccatccatgcaccaatccacccaacattctttctatctccctctctctctctctctatccatccattcaccaatccccgtgattcttaaccagaagagattctgcccccccaggggacacttgacaatgtctgcagacatgtttgattgtcacacttggggtgggagtgctactggtatctggtgggtggaggccagggttgctgctttacatcccacaatgcatagttcagccccttaccacagagaatgatcctgccccagtgtcactactgctgagcctgagatgccctggaggaaatggagagatgattctccacctcccaggatgaactggagggaggtaggcacttcccacatcctccccccttctctccctcaggcagcatgagctggatttcctgccggggcatctctgggggcattgaagacctgctggatgactttgacctgtgtgcccctcacctggactcccctgaggttggcctggtccgtgaagccctccagctctgccgccctgctgtggagctccgaggcatgggtgagtccagatggcctggataggagtgaccaggacgggcactgacttctagaaacatgctctcctcattgagtcatgagctggattttcatcaattctcatacctttcctgtctaaacatgtgaattttcccccagcagtgcttctagaattttttttgacatgtggtatcgctgtgtcacccaggctggagttcagtggtgcaatcgtagctcactgtagcctcagactcctgggttcaaatgctcctcccacctcagcctcctgagtagctaggaccacaggtatgcaccactgtgccttgctaatttttctatttttcgtagagacagggtctcactgtgttgcccaggctagtctcaaactcctgggctcaagggatcttcttgcctcagcctcccagagtgctaggattatagatagacatgagccatggcgcctggcctagaattttaaattgagcctgggagagctttggactgaatactaccaaagcagggcccatcctgttgccctggacttttctttagaaagtgccaggtagggctgggcgcagtggctcacacctgtaatcccagcactctgggaagccgaggcaggcagatcacaaggtcagaagtttgagaccagcctggtcaatatggtgaaaccctgtctctactaaaaatacaaaaattagcagggtgtggtggtgggcacctgtagtcccagctactcgggaggctgaggcaggagaattgctggaacctgggaggcggaggttacagtgagccgagatcgcaccactgcactccagcctgggcaacagagtgagactccgtctcaaaaaaaaaaaaaaaaaaagaaagaaagaaaagaaagcaccagataggaactatttcgagaaaactcgaggaaattatgtaggtacatatatgataagagagaaaacaaagttcccacatattttttattgatgaaattcaaaatataataataactgagtacaaaacttcaggttcagagttggttttcactattatctggtccattgcaaacacatggctgtaaaaattattctcaggctgagcatgatggcttacacctgtagtcccagctacttgggaaggtgaggtgggaggatcaattgagcctgggaggtcgaggctgcagtaaactgtgattgctccgctgcattccagcctgggtgacagagcgagaccctgtctcaaaacgaacaaaccaaaaaaaaacttatttctagctcccagatgacttgggctgggtctggccctcagactgcaatttgctactccctgccctagagcttgaagaatctctccaagtctttagacgctctggccatgaggatgttctgtttggttttgttttaattatagcaaaatacatgtcttaaccattttttttttttgagacaggatctcgcttcattacccaggctagagtacagtggcatgatctcagctcactgcaacctccgcctatcaggctcaagagatcctcctacctcagccttctgagtagctgagactactgacatgtatcatcatgcctggctaatttttgtatattttgtagagacgggattttgccatgtttcacaggcaggtcttgaactcctggactcaagcaatcctcctgcctcagactcccaaagtgctgggatgacaggcatgaaccactgtgcctgacccccatcttaaccatttttatgtgtgcagttcagtgattaaatatattaataatgtgcagctatcaccaccattcatctccagaacttgttaatcttcctaaagtgaaactctgttttcattaaacattcactccctgtactagtctgttttcacactgctataaagaaacacccaagactgggtaatttacaaaggaaagaggtttaattgactcatagttctgcatggctgggaaggcctcaggaaacttacaatcatggcagaagggaaagaggtgcgtctttttttttttttttttttttttttttggtgagacagagtctcgctctgtcgcccaggctggagtgcagtggtgcgatctcggctcactgcaagctccgcctcctgggttcatgcatggcagcaggcgagagagagggagcaactgccttataaaaccatcggacggccaggtgtggtggctcacgcctataatcccagcactttgggaggccgaggcaggcagatcacttgaggtcaggagtttgagaccagcctggccaacatggtgaaaccccagctctactaaaaatacaaaaatttgtcaggcgtggtggcacatgcctgtagttccagctacttgagaggctgaggtgggaaaattgcttgaacacgggcggcagaggttgcagtgaccagaaatcccaccatgcactccagcctgggtgacagagtgagactgtgtctccaataaaacccaaaaaaccatcagatctcgtgaaaactcactgtcatgagaacagcatgggggaaccacccccatgatccaatcacctcccacctggtccctccctcaacatgtggggattatggggattacaattcaagatgagatttgggtagggacacagagccaacccatatctctccccattctcccttcaccccagtccctggcaaccaccatgctattttctgtctctataaatttgactgctttaggtatttcatataagtggtattttacagtatttgtcctttattctctgacttctcttactgagcagaatgtcctcaagtttcatccacattgtagcatatgtcagaatttccttcctttttttttttttttttttttttttgcacgacagagtctcgctctgtcacccaggctggagtgcagtggcacgatctcagctcaccgcaacctccacctcctgggttgctcaagcaattgtcctgcctcagcctccagagtagctgggattacaggtgtgtgccaccacatgcagctaatttttgtattttttagtagagatggggttttgctatgttagccaggctggtctcgaactcctgacctcatgtgatctgcccaccttggcctcccaaagtgctgggattacaggcttgagctaccatgcctggctaagaatttccttccttttcaaggctaagaatttccttccttttaaaggcttaataatattgcattgtatgaatatgccacattttgtttatccgttcatctgtctgtggacatttgtgtgtttctaccttttggatattgtgaaaaggaatcactagatcacatggaaattttgtgtttaactttttgaggaacgaccacttcattttccacaaaagctacaccattttataatcaaactatgggagacaataaataatatctttttctctacccttttatgttcagtgataggggcctgtgaattaagacagcttaacaggagaaagggctcacacattttaattttacatgcacagaagtttcacagaaaagtgaaaactcaaaggagtgtttagacctggggccttaaataccatgttaacaaagagcaataaattgtgagctgaattcacaaaggaagggggagtattcaagatgcttaagtctctgtatccaaagtgcttccccatggatgtgaataggatgttaaaaaggatgaccagtggcctgtgattcctatgcagagcttctaatcctggccctgcaaaccatccttgaactatctgcttctctttattctcctggccatcagcccagggccagtgctgctgtctctcctccagacagcatcctcggaggtctgcctactttggattcattcttaccctttggtttattttccatacagcactcagaagaatcttgaaagcccaaaacggccggggtggctcaagcctgttatctcggcactttgggaggctgaggcaggtggatcacttgatgccaggtgttcaagagacagggaacaaaagctgggaaaattgccttataaaaccatcagatggccaggtgtggtggctcatgcctataatcccagcacttcgggaggctgaggcaggcagatcacttgaggtcaggagtttgagaccagcctggccaacagggtgaaaccccatctctactaaaaatgcaaaaattagccaggcacggtagcacgcacctgtaatcccagttactcgggaggctgaggcaggagaattgcttgaacccagcaggcagaggttgcagtgagccgggatcacaccactgcactccagccttggcgacagagcaaaattccattaaaaaaaaaaaagagcccaaatctcactaagtatctctattgaatcttctagatggttctcccattgtccttgggataatgacctttccagtactgtagcctacatggctgtgtatgactcactctcctgggagatgcttgtctccatccttactgccccagacagtgatggaaacatccaagcttgcgtgccgggggccctgggctgggactcgcctcccccagcccttctgtggcaactttggagctcagctaaatgcgattcctcagagaagccttgtctggccaccactgaagcttaacttctctatgtctccccgatccttgcctctgaattttctatcactgcaccctgttttccatctgtcttggctctttttcttttttctttttttagagacaaagtcttgccctgttgtccaggctggagtgcaatggcatgatcatagcgcacagcaccttcaaactcctgggctccagtggtcctctcacctcagcctcccaagtagctgggaccacaggtgcacaccaccacccctggcttgtctttgcctttaattatgatttctcttggttttcttttgcatcatctgtctgccacatcagactctgagctccataaggccaatggcatcatctgttttctccctgccaaatttttacctttaacacattgatatggtttggctgtgtccccacccagctatcatcttgaattgtatttcccataatccccacacattgagggagggaccaggtggagataatcgaatcatggaggtgttttcctccatgctgttctcctgatactgagtaagctctcaagagatctgatggggctttttaaaataaggggcttccccctttgctcagctctcattcttctctctcctcccgccttgtgaagaagggcgtgtttgcttccccttccaccgtgattgtaagtttcctgaggcctccccagccctgcagaactgtaggtcaattaaacctctttcctttataaattacccagtttcaggtatgtctttattagcagcatgagaacagacaaatacacacagagaccacaaattttgagccccaccgtgtccattgaaatcttggcgctgccacttcttggcagtgtgaccttgcaaaccctttaccatccctccccctgccccacagccctcagttttcccatctgcagaatagggatgctgagtgaccatcccacctagggctgctgggaagagtacgcgcatcagttcacacagaacctccacccgtgttgccatcgagggtcctgttactgtcatatgatagcattgttgacatgaatagcctaggatgagctatttctgccctgaaaccctatttttgtcatctgcaaaatgtgcaattgaactaaaatgtgtccagaactccacccaatgtgaagatgctggtgcctgcaatcatttatgcctttcttatgcattcacacaacccctactgattatctgccatagccccagctcccacagggacctaaatatagttaatgtttgtctcagcctttaagagagggagatggggccgagtgcgggggttcacgcttctaatcccagcactttgggaggcccagacagaaggattgctagagggcaggagttcaagaccatcctgggcaacatagcgagaccctatctctgtaaaaaaaaattaattagttaaaaatagatagatggctgggcacagtggctcacgcctgtaaccccaatactttgagaagccgaggcaggcagattgcttgaggccaggagtttgagaccagccttggtgacagtgaaaccccatctctactaaaaatacaaaaattagccgggtgtggtggtgcatgcctgtaatcccagcttcttgggaggctgaggcacgaaaattgcttgaacccgggaggcagatgttgcggtgagccgagatcacgccaccgcactccaacttgcacgacagagcaagactctgtctcaaaatacacaaataaataaagagaaggagatggaacagcataccaaacaactggaatttaaggcaactggaaagaaaaataacgcgagaggcgctcgccaggagttgtaaaccttgatggagcaacttcccaggaaaacagccttgggcatgacttcccattttaaggaagatttaaaagcccagatctctcagcaagttccctgcaaagccccttgattgacaacctgtggctcccccagcacaaggaggaggtgtaggaacaaatgttatcaccagagggcgctgctggacaaccatgtgctctccgtacatccaagcacgctggcgaatggggaccattcaacataacatcctaaatgatccaacgcgatcacgagtccttttttttttttttttttgagaaggagcctcgctctgtcacccaacttctgcctcctgggttccagcgattctcctgtctcagcctcccgagtagctgggattacaggcctgcgcgccaccatgctcggctaatttttcttaatagcccattttttaatagaacggttttaggttcacagcaaaattgagtgaaaggtacaaagatttccaatatatccctcctctgatcctacttttattgaaaaggttgagtctgagcacagtggctcacgcctataattccagagctttgaggggtcgaggaaggaggatatcttgagcccagaagtttgagaccagcctgggcaacataacgagaccccgtctctacaaaaaataaaaaactaacgaggcgtggtgacgtgcatctgcagtcccagctaatatagaggctgtggccggaagatcgcttgagcccaggagtttgaggctgcagtgagctgcgatcgtgccactgcactccagcctgggtgacagagtaagaccctgtctctaaaaaaataaatagccaggcgcggtggctcatgcctgtaatcccagcactttaggaggccgaggcaggtggatcacttgaggtcagcccagccaacatggtgaaaccccgtttccactagacacacaaaaattagttgggcctggtggcgggcacctgtagtcccagctattagggaggctgaggcaggagaatcgcttgaacctgggaggtgcaggttgcagtgagccaagatcgcaccattgcactccaacctaggtgacaggctaaaattccatctcaaaaataaataaataaaataaaataaaacaaacaaataaattagctgagtgtggtggcgcatgcctgtagtccctagtatttgggaggctgagatgggaggattgcttgagcccagaagtttgaggctgcagttagctttgatcatgccactgcactccagccgggacaacagagtgtgataaaagaggaaggaagaaaggaagggagagagggagagaagaagggagggaggaaggaaagggaagcattctaggcaacctgggcaaaggctggagactggaaacagctgggtgcctctgaagcaagggtaagtgtgtctggagagcagagaaggagacaggagcggacagcagaggccagtagctgaggtattgtgtcttcttttgttctggagcccctgcagggagcagagactcaattggcagggagggtagagggggctcaatccaggcaacttagtctacatccctttgttgcagagaggagcctcctgtacacagaactgctggccagactccatttcttcgccacctcacatccagcactggtgggacagctatgccaacaggcccagagctggttccagttgtgcgcacaccctgtgctggtgcccctcggaggattcctccagcccccgggaggacccctccgggcaactctcagcggctgtcacaaaggtgagtctccccagcatagcaaaaatcccagcaggcacctgcttgcctgggggcagtgaaggccaggtgtttgaggttgtcctctgggactcccctgtgctagttgggaggccccaagcttgccatcagagcctgcccctgctgtctcatgctgaatcagctctctctgccccacctcaagggactgtagatgtctcatataaattcttctaatgagcccgatgctagggggtgcctccaagcttcccatctccaagggattggtgcccatctgacagtttcagctatttacaagctcatgctagtaattctgaaagctaggaactgatgcctgacagtcctctgagaagctgaaggaactgtaagcagcccttggaatcccagaatgtaagggagaggagaggatttaggttttgccatccatttgtcattcatttttttcttccttccattcatccaaccatctatgcatccatcctttcattcaccttcctactcttccatccaattaccctcccatccattcattcatctctctatctacctcccacccttccattcatctatccatccatccaccagcctcccacccacccatccattcatccatccatctatccatccatccatccatccatccatccatccatccattaattcaccttcctactcttccatccaattaccctcccatccattcatccatctatctacactcccacccttccattcatctatccatccatccatccaccgtcctcccacccacccatccattcatccacccatcttctctgccacccttccatccatctactgccccatccatccatccatccatccaccttcccactctcccatccatctatcctcccacccttccatccatctatccatccattcactcatccacccacccattcatacatcagttgtccattcatccaatcatctacccacccttccatttatccatcaattcatctatcaaaccactttcctctccatccatccatccatccatcctcccacccatccacccatccatctacccaccctgctacctttccatccatctatcccccatctctaaatccatctaccctcccactctttcattcatctactgttccactgttccatccatccacccatccacccatccatccatctatccatctaccctaccactgtttcatttatctagccccattcatccatccacccatccgttattcatcgattcatcaaatcatttactcaccttttcattaatctatccatccatccattcatcaaatcaccttcccatcctttcatccgtccatccacccacccttccatccactcacccacctacacacctttccttccatccatccactcacccatccattcatccattcattcatccttcaaccctttctttcttccttccttcctctcttctatccacccatcagtcatccacccctctacccacttatccttccattttcttcatctgatcatcttccattcattcacttacgcctccacccatccacacacttagccattcatcaactttctcacttcaatttcatcgagaaactgattcctccatctacccatctacctgcccatccattcacccactcactcatccaactagccacctgtctacccactcatttacctccattcacccatctatttatctgcccacccacaatctctcacactgattgtgagaccactgagttcacttgtggttcaaatgtcagagctccttactgtgccacatgacctggcagtgagagctgcactccccaggcacattattttcaaaatagaaatgctaagagacactaagtacaatgcatggaggagttgatttaggggcagccactagaatgctgtgttgaggattctaagactgaagctagcttagtgggaaagagtgtgtatttgttagaatataggctcagatgttgtaaaaaaaaatggccaaaatatcagtggcttaaataagataggagtttaattctctcttttgaaatagttcaagcaaaagcagaggcaagagggagtctttagggtgtctgggacccatactctttcagtctggcgctctgccattttcagtgtagggctgtcctcgttggcccaatatagctgctccaactcctaccatcaagatggcattccagccagtggggaataggagaagcagatggcaggcctcttcattttaagggcacgacctggaagcagaactaaatatttccactcctgtctcattggcaagaacttggatatctccaactgtaaggaagcctgggaaatatgtttttatatttttatttttatttttactttttatatggagttttgttcttgtcgcccaggctggagtgcagtggcgcaatctcggctcactgcacctctgcttcccagattcaagccattttcctgcctcagcctcccaagtagctgggattacaggcacatgccaccatgcctggctaatttttgtattcttggtagagacagggtttcaccatgttggccaggctggtctcaaactcctgacctcaggtgatcgcctaccttggcctcccaaagtgctgggattacagggttgagccactgtgctcagccagggaaatgtggtctttgtgcggataactatgtactcagctaaaacctgtaggcttttgggttttattactaaaggtgagatgatagaatgactatgggggcacaaatcgcacatagtgctgtgattgattaatgatgtctgtcatggcacaggcataggaagttacagcttagcgtgacatttttctcatctctggggcagggaaatgttctgtgtttcagatccactgtgccccgctgtacatcctctagttctgttaaagttgagaaagttcttacctgtgtggacttcagtttgttcatttttaatatgaaaagtatggccaggcatggtggctcacgcctgtaatcccagcgctttgggaggttgaggcaggtggatcatgagatcaggagttcaagaccagcctggcctacatggtgaaaccctgtctctactaaaaatacaaaaattagccgggcgttgtagcggacacctgtaatcccagctactctggaggctgaggcaggagaattgcttgaaactggaaggcggaggttgcagtgagcggagatcgttccactgcactccagcctgggcgaaagagtaaaactccgtctcacaaaaaaaaaaaaaatgaaaagtatgagttaatatttccaaggtcacacaatgagtgcataagaaaaaaagtaaaaggggctgagcacagtgatttatgcctataatcccagctctttgggaggccaaggcaagaagatctcttgggccgagatgttcaagaccagcctgggcaacataaggagaccttgcctctacaaaaagttaaaaaaaaaaaaaaaaaaaaaagctggtcatggtggtatgtgcctatagtctcagctactcaggaggctaagatgggagaatggcttgagcccaagagttcgaggctgcagtgagctgtgattgtggcactgcactccagcctgggtgatagagtgagaccctatctgaaaaaaaaaaagaagaagaaaaggaagggaaggagagtggggaggggaagggagggaaaggagagggaagagggaaggaactggagggaagggaaagggaactggagggaagagggaagggaaggggaaaggggaagaaagggaaggggagggaaggggaaaggggaagaaagggaaggggagggaaggggaggggaaaggggagggaagggaaggggaagggaaaggggagggaagggaaggggaggggaaaggggagggaagggaaggggaggggaaagggaaggggaggggagggaaggggagggaaggggaagggaaaggggagggaaggggaggggagggaaagggagggaagagaagaggaggaaaggggaggggaaagaggagggaagggaaggggaggggaaagaggagagaaggggaggggaggggaagggaggggagggaaggagagggaaagggagggaaggggaagggaaaggggaaggaagggaaggaaaggggagggaatgggaggggagggaagaggagggaaggggaagggaaaggggaggaaagggaaggggaggggagaggtgagaaagggatgggagtgaagagggagagaaggggaggggaaggagaggaggggataggggaggggaggggaaagtggaggggaggggaaaggggagggaagtggaggggaagggggagggaaggggaagggaaaggggagagcaggggaaaaaggagggaaggagaaaggggagggaagggaagggaaggggagggaaggggatgggagggaaaggaaggagaggggagggaatgagagggtagggaagaggagggaaggggaagggaaaggggagggaagggaagggaaggggagggaagggaagagggagagaaggggaggggaaagggaagggaagaggggggaaggggaggggagaggaaaggggaaggaaagagaaaggggaggggaaggaaaggaaagggagggaagggaaagggaaggaaaggaaagggagggaagggaaagggaaggaaatggaggaagggggagggaagggaaagggaaggaaggggagggaagggaaagggagggaaggggaggagaagaaaggaaaagaaaacaaatcccatctcctcactctctgtcccgatgaggtggaaacaaaattctgtattctcagagcttgacgggctctgattcagcaccacccattttacacatgtggaagaggcacacagaaggaaaaggacttcctttctttactccaggacattcagaaagttcagtttcttagtgtctaggcccacgttttctccaatatatcttggcccttctctctctgcagtgatattttaatcaaactccaccaggcagagatccttggggtgtgtttgcccaattcattggcaaatatatattttttttctttaggacatcagcccttgtttttctacaccagttgaactcagagatgtcaaaaacataatcctcattctcagccaatataatttctttctttcttttcttttctttcttcttcttcttcttcttttttttttttttgttgttgttgttgttgttgagacagagtctccctctctcacccaggttggagtgcagtggtgtgatctcagctcactgcaacctccacctcctgggctcaagtcattctctggcctcagcctcccgagtagctgggattacaggtgtgcttcactatgcctggctaatttttatatttttagtagagactgggtttctccatgttggacaggctggtcttgaactcctgacctcaagtgatccgcccacctcggcctcccaaagtttggcctcccaaagtattggcctcccacagtgctgggtggcatgagccaccgtgcccggccatggccaatgtgattttgtttctgagttttcttcaactaaggcagggtttctcagccatggcattgctgacttctggggctgaatctttctctgggatggggttgtcatgcgttgctgggtgttgaacagcatccctggcctgcacccaccagatggcagtactgtccttgagcatccttgtccccattgtggcacctcaagatgtctccagaaaccgatatgtgtccgctgggtgagcactgctagactagacagacacttatgaccacactgtgatgcagtccccttccctacctaagagcgaagtgaatgtcacaggccagagtgtgaatctgtgcatctgagtctgcgaatctaatccttgctgtgcagctttgggcaagggaccaaatctctctgtgcctcagttgtcttatctgtgaagtggggggctcattagaggaccccatagctgaatacttggacacaggaactgagatcattgctgttgcctctgtgtggctgcaggcatcaccgccatggcatggggtgtggaggagaagctgctggtgattggcacccaggatggcatcatggctgtgtgggacatggaagagcagcatgtgatccacatgctaactggacacacaggtgagacttgggaagtgggctttgtggtcagcttccatagtgaaaagttggttctcagagccccttccccacagattcacttctctgtattgaaaccctggcctttgttcctgcatcacttagctatagttgcataatgaaccatccccaaacacagtagtttcaaacaagccatttctttttctttttaaatatgggatctcactgtattgcccaggctggagtgcagtggtgtgtttataactcactgcagcctcaaactcctgggccaagtgatcctcctgcctcagcctcctgagtagctgggactacaagcacataccactatacccagctaattttttaatgtttttagaaatggggtcttgctatgttgcccaggctggtctgaaactcttgggctcaagtgatcctccctccttagcctaccaagtagctgggattacaaatttgagccacaaacaagctatttctttagctcacttcctgtgcattggcaatgcaggctggacgcagctgggcagttttctgctctcagctgggcttgctcatgtatctgcagtcagtcagtggattatctaggagctggctgaatctgaatattttcaaatgaggcaactcaactttgctccacgtggtctgtcatcattcagcgtccttcaggtctctcatccccagcaaaggcaaggtttctttttttttttttttgagacggagtcttgctctgtcgcccaagctagagtgcagtggtgcaatctcggctcactgtaagctctgcctcccaggttcacgccattctcctgcctcagcctcccgagtagctgggactacaggcgcccgccaccatgcctggctaattttttatattttttagtagagacggggtttcaccgtgttagccaggatggtctcaatctcctgaccttgtgatccacccacctcgtcctcccaaagtgctgggattacaggcgtgagccaccgtgcccagccaaaggcagggtttcaagaaaacaagtaggcactcacagaatctcttaagcctggacttggagttggcacctggtcacattcacattctcttgaccaaaggaattcacaagagcagtccagtagggaaataggctaaataggctttctgccttcttttcttttctctttcctttcctttcctttctcttctctttccttttctttttctcattctttttttctgacagggtgttgctctgttgcccaagctggagtgcagtggcacaatctcagctcactgcactctcagcctcctgggctcaagcaatcctcccatctcagcctcttgagtagctgggactgcaggcacacaccaccacacctggctgatttttgtattttttggtagagacagggtctcactatgttgctgaggctggtctcaagctcctgagctcaagcaatcctctcgccttgtccttccaaagtgctgagattacaggtgtgagccactacacccagcctaggcttcattttttgatgggaggagctgcaaagtcacattgccaaggatgtggatcagtaagggtaaagaattgtggtcctttttgcatttgtcgacctcagatcctaagtaaggttgtttatttctacatagtcccttaacagatatggcttatttctgtaatcaattgttgagtgcctgctgagtaccaggtcctgttctagatgctgaagagagatagacgagggtcgggactaggatggaaaactattcattcttgaagactaatctcaagggtcctccctttgggagagatgattcccacagtagagttcataactagctaccttgtgctctcctgcagcttgatatacataggaccacattggctaagactacagttggctgggcgtggtggcttatcccagcactttaggaggctgaggcaggcagatcatttaagctcaggattttgagaccagcttgggcaacatggtgaacccacatctctacaaaaaatgcaaaaattagccaggcatggtggtgcacacctttagtcccagctacttgggaggctggggcatgagaatcgcttgagctcaggagattggggctacagtgagctgtgattacaccactgtactctagcctgtgcaacacagcgagaccctatctcaaaaaaaaaagcaagactacatttatttgttgacctgagatcttattactattgtttgagggcaagggttatgttttattcaacatactccatgcttatttgttgaataaataagttaaaatatcccatgtgtttaaaaaatacatttaacagaatcaagtcatcgaaaattagctttagaaagaatctaatctaggccaggtgcagtggctcacgcttgtaatctcagcactttgggaggcctaggcgggtggatcacaaggtcaggagatcgagaccatcctggctaacacggtgaaaccctgtctctactaaaaatacaaaaaaaattagctgggcgtgatggtgggtgcctgtagtcccagctactcgggaggctgaggcaggagaatggcatcaacccaggaggtggtgcttgcagtgagccgagattgcaccactgcactccagcctgggcgacagagtgagactctgtctcaaaaaaaaaaaaaagaaaaaaaaaaagaatctaatctaacccttttatgtaattaagaaaacaggttgggcattttatttaattaataaaacaggactcacacctgtaatcccagcactttgaagatgggaggatcacttgaggcccagaattcaagaccagcctgtgcaacatagcaagacgtcacctctaaaaaaaaaaaaaaaaaaaaaagtgttttaaattagccaggcatggtggtgtgcacctgaagtcccagctacgtgagaggctgagccaagaggattgcttgagtccaggagttggaggctgcagtgagccatgtttgcaccactgtattccatcctgggcgacagagtgagaccttgtttccaaaaaaccaaacaaacagaaaaatgggtgggggtggagaaggtctaaagagctgaatcaaatttctattagagatgacatattcaaatttttaaaaaatttaaaggggtgccctaaaaggctcaattgacaagatacataatattatgacacaatcttttgaaaaatcaaaagtttaattggccctccatatctgtgggttttgcatctatagattcaaccgactgtggattgaaaatatttggaaaagctggatgcagtggtgtgtgcctgtagtcccagctacaaggaggaggatgccttgagcccgggtgtttgagttcagcctgggcaacagagtgagatcctgtcttttggttgttgttggctgtgtttctttttctttcttccttttccttctttctttctttctttctttctctttctttttccatccttccttccttctttccttcctttccttccttccttcccttccttccccccttccccttcctcccttctttccttcctccctccctccctcctttctctctctctttctttctttccttctttctttcttttctttctttcttttttttttttcaggatctcactctgtcatccatgctggagcacaatggtgcaatcatagtacactacaatcttgacatcccaggttcaagcaatcctcccacctcagcctcctgaagagctaggagcacaggtgcatgccaccatgcccaactactttttaaaacagtttttgtagagactgggtctcaccgtgtttcccaggctggtcttgaattcctggtatcaagccatcctcccacctcagcctcctgaagtgctggaattacaggcataagccactgtacctgtctcttaaaaataaatttaaaggtggggaacggtggctcatgcctgtaatcccagcactttgggaggccgaggtgggtggatcacctgagatcaggagtttgagaccagcctggctaacatgatgaaactctgtctctactaaaaatacaaaattagccgggcgtggtgatatatacctgtaatcccagctactcgggaggctgaggcaggagaatcacttgaacccaggaggtggaggttgcagtgagccgagatcgcgccactgcactccagcctgggcaaaaagagcaaaactccatctcaaaaaataaaaataataaaataataaataaataaaataaaaataaaataataaaataaaaaataaataaaaataaaatttaagaccctgtctcttaaaacaaataaacaaataaatacaatttttacaaaggaaaatatttgggaaaaaaatagttaactgcatctggactaaacatggacagacctttattgtcattgtcccccaaacaatgcagtataacaactatttacatagcacgtatgccatattaggtattgtaagtaacctagagatgatttaaaatatacaggagtggccgggcacagtggatcacgtctgtaatcccaacacttcgggaggccgcggatcacctgaggtcaggagttcgaaaccagcctggccaatatggcgaaaccccatctctactaaaagtataaaaattagctgggcgtggtggtgcacacctgtagtcctagctacttgggagaccgaagcaggaagatcacttgaacctgggaggtggaggttgctgtgagccgagatcatgccactgcactccagccttggtgacagtgagactcagtcttaaaaagaaaaaaaaaaaaagaaaaattaagtatacaggagcacctgtagtcccaggctgcggctgaggcagaaggatcgcttgagcctgggagatcgaggctgcagtgggctgtgattgcattactatgctccagccggggtaacacagccagacccgtatctctaaaaataataataatggtaacaatagtaataaagtatacaggaggatatatataggctatatgcaaatacgacactatttcgtataaggcactggagcatctgtggattttggtatccgcaggggtgaaggaagggcaggggagaggaaagagcctcccaggcacagggagcagcaagtgcaaaggccctgagaggggaatgaggttggcgggtctacagaacagcaaggaaatcatgaggctggagctccagagattatgtcaaataaaaaggagcagtcggctgggcgcggtggctcacgcctgtaatcccagcactttgggaggccaaggtgggcagatcacgaggtcaagagatcgagaccatcctggccaacatggtgaacccctgtctctactaaaaatacaaaaattagccaggtgtgatggcacacacctgtagtcccagctactcaggaggctgaggcaagagaatcacttgaacccggggggcggaggttgcagtgagccgagatcgcgccactgcactccagcctgggcgatgacagagtgagactccgtctccaaaaaaaaaaacaacaaaacaacaacaaaaacagcagtcaccaggggccacatggtgtgcgactcccatggatatgaaatgtccagaacagactaatccacagagacaggagagacaagaggcagattagtggtggccaggggttaggggaggggagtggggagtgactgctgatggggacagggtctccttctggggggttgcgaatgttctggaactagatagagtgatggttgcacaacactgtgaatggctaaatgccactggattgtttgctttaaaattattaatgtgataggccaggcgcggtggctcacgcatgtaatcctagcagtttgggaggttgaggcgggcacatcatttgaggtcagaagttcgagaccagcctggacaacatggtgaaaccccatctctactaaacatacaaaattagttgggcatggtggcgcatgtctgtaatcccagctactcaggaggctgaggcaggagaatcgcttgaatcctggagtgggaggttgcagtgagccgagattgcgtcactgcactccagcctgggagacagagtgagactctgtctcaaaaaaataaaataaaataaaataaaataaacaaacaaaatttaaaaaattaacgtgataaagaaaaaagaggatgactgttttctgagattatgaaaatgttctgaacttatatatatatacacttatatatacatattttaatctatatttttgtgtatgtatatatttatgctttatgtatgtaaaacataatatatatgtgtgaataaaacataaatatatacatacatgaaagtatatatacatatatacaaaaacaaatatatacataaatatataaatatatactatatatatatttttatcaatgttttgccataaacattcttttgtgtccattgactcttttttttaaatttttttgtttttgagatagagtcccactctgtcgcccaggctggagtgcaatgacatgatcttggctccctgcaacctccgcctcccaggttcaagcaatcttcctgcctcagcctcccaagtagctgagattacaggcgcctgccaccacacccagctaatttttgtatttttagtagaaacaaggttttgccatgttggccaggctagtctcgaacccctgacctcaactgattcacccaccttggccttccaaagtgttgggtttacaggcgtgagccactgtgccagcctatttttattatttttacttttttttttagagacagggactcactatgttgcccggcttgtctcggactcctgggctcaagtgaccctcccacttcggcccctgaaagtgctgggattacaggtgtgagccacctggcccagtcatatccttgttctgttattgtattttatttcatttataatttccaccatcaatttcacagggtacatgtgcatgtctgctacatgggtatattgagtgatgctgagatttggggtacgaatgatcccatcactgaggtagtgagcatggtacccaagaggaattttgttagcccttgaccctcttcctccttccccattccagtagtccccagtatctgttgttcccatctttatgttggggacactttttttttttgagacagagtctcactctgttgcccaggctggagtgtagtggtccagtcttggctcactgcaacctctgcttcccaggttcaagcgagtttcctgcctcagcttcccgaggagctgggattacaggcgcacaccaccacacccagctaactttcgtatttttagtagagacggggttttgccttgttggccaggctggtctcgattcgaactcctgagctcaggcgatctgcccgcctcagcctcccaacgtgctgggattacaggcatgagccaccctgcccagcctgggattacttttataaggacagtaatcccattccccagagcgccatcctcataacctaatcacagcctgatgaactttttgtttattaagcagaatctccatttgtctgttatatgttgcaaatatttcctccacatctctcatgatgtgccttccaactgcagtttatcctcctgaagttttacatttctacataatccagttggtcagtttttcccctttatgccttccaaattgtacgttttgcttagcaaatagctctctaagattattatatttatttatttattttgagacaaggtcttgctgtgttgctgaggctggagtgcagaggagtgatcatagctcactccagcctcaacctcctgcgctcaaatgatcctcccacctcagcttcccgagtagctaggaccacaggtgcatgccaccccacctggctaattatttttttgcaagattataaaaatgatgagagaaatcctataatttttctagaagttgccccttttttacgtggttattaattttagacactcttagatgctgaatctttataaaactcaattatctgtttagtattcaacatctggggcaactgattgactcccaaccagttgtggccctctgaattttgctttgccacatttcattattttccatttggacaggttctatcaatttaaccaacagagagaggctctcaaaacaaaacaaaagtaaaaagaggctgggcacagtggctcacgcctgtaatcccagcactttggaaggccgaggcgggtggatcacctgaggtcaggagcttgagaccagcctggccaatgtggtgaaaccccatctctactaaaaatacaaaaattagccaggcgcggtggcacatgcctgtaatcccagctactcaggaagctgaggcatgagaattgcttgaacccatgagacacaggttgcagtgagccaagattatgccactgaactccagcctgggtgacagagcaagactccatctcaaaatagtaataataacaataataataataataataataataataatcatcatcatcatcatcatcatcatcatcatcatcatcataggccaggcgcggcggctcatgcctgtaatcccagcactgtgggaggccgaggtgggtagatcacctgaggtcaggagttcgagaccagcctggccaacatgatgaaactgtgtctctactaaaaatacaaaaaatttgccaagtgtggtggtgggcacctgtaatcccagctactcgagaggctgaaacaggagaattgcttgaacccgggaagtgaaggttgcaataagccagggccacgccactgcactccagcctgggcaacaagagcaaaacttcatctcaaaataataataataataataataataataataataataataataataataataaaaggccaggcatggtggctcatgcctgtaatcccagcacttgggaggctcaggtgggtggatcgcttgaggccaggagttcaaggccagcctcgccaacatagtcaaacccgtctccactaaaaatagaaaaaattagccaggcatggcggcaggtgcctgtaatcccagctacatgggaggctgaggcacgagaatcacttgaacccaggaggcagaggttgcagtgaaccaagattgagccactgcattccagcctgggtgacagagagagtccgtcaaaaaaaaaaaaaaaaaaagagggttacataattgttttgaaataattatccttgattacaaaaatcaataatgagggtgtggctggacaggaagttgctgggcagattgccttgcagatgtattttttctgtaaggttgcagtagcctttgtgcaaggttgtgatttttgtagttttttctgttattaggcatacaagcgtgagaactctttctccatagccttcctttatagcctgtttgccagggttttcttaatgttattgactccatttttattctgatgactttcacaattcaattccatccatcttttctttggtaaatgagggtatttccaagctgacaagcattttaatagttgcaaggccaaaatgttcccagctaatatactctcccctaccctggcctgctgcaggagaggtgaggtgtgtgaaaatatttgccaaagggaccctcgccaactctgcttcaaaggattacacgctgcacttgtggaacttactctctggccaggagaaatttaccatttgggatggaggctcaaaaaatcccgctgaacctcagatctggaaccttcatgtggatgaggcacacaaagttgtgtattcagcatctggctcaaaggtaacaaacatatgccctgtttgtaaaggaaagctgagaccagagcattcaaagacagaataggccatttctataaggagggctccctgatacagtgatggggtgggggtgtaaatggagtacacaaccacttgagagggtgctataagaggtttcagacttcatagttggattagacaatcctgataattctttctgaccccaagatttgaaacctttcatcttttttgaatatcagcattttagggctataaatttccctcaaagtactgctttacctacatcctgtaaattttgacgtgtgttttcatttacattcagtttaaaatactttcagatttcacttttgatttcttctttgatccatgggctatttaaaagtatactattagtttccagatatttgaggaatttctggatagggtcctgttctgtattttttttctaattaaattccattttgatgatgtaaaacctttcaaattcattgagacttcttttatagtctctctctctcctctctctctttttttttttttttttttgagatggagtcctgctctgtcgcccaggctggagtacagtggtacaatctcagctcactgcaacctccacctcccaggttgaagtgattctcctgcctcaggctcctgaatagctgggactacaggcgcacgccaccacgcccagctaatttttgtatttttagtagagacagggtttcaccatgttggccaggctggtctcaaactcttgacctcaggtgatccacctgccttggcctcccaaagtgctgggattacaggcctgagccatcatgcctagcttgttttatagtctctctaaatgatctgtgggcttctgaaaacaatgtctgttccactgtgttattccattacatcaatcataaccctgtgatttcatagttttataaatggagacacacaataacttcgtgggtgatagcttactaattgatgccaggaggaaaaaaaatctttatttaactaccagttgagtttcttgggaactcagtgaccttggttgtgtcattcaccattctgagtcttattgctgcctcttcctcataagatcatgagacatatcctggcatagtgcttagcacactgtaagcaccaaataattgatatctatttattattatgttacataagtaattggtggttgttgacagtaatatcagtgcatataaatcatgctgcccaaaataggagtcaccaaccagatgtacctattaaacacttgaaattcggggggtagggggtaaggggagggagagcattaggacaaatacctaatgcatgtggggcttaaaacctagatgacgggttgatagttgcagcaaaccaccatggcacatgtatacctatgtaacaaacctgcacgttcggcacatgtatcccaaaactgaaagtaacattaaaaaaaaataaataaataaataaataaataaataaataaaaacacttgaaatgtgactgtcccaacatgctgaaattcaaagacctagtatagtaaaaataatataaaccatctcaataataatttttgtattgattacatgttgaagtgataccacttggacatattaggttgaataaaatataatactaaaattgatttcacttgtttctttgtaccttttgtaaggtagctaatgagtttaaaatcacatgtgaggcctggcccacctctcctttttttctctgaattgggagtgttaaaaataaaatgcataggccgggtgcagtggctcacactcataatcccagcactttgagaggctgagcagggaggatagtttgagcccaggagctcaggagcagcctgggcaacatagtcagaccctgcctctacaaaaacaaatttaaaaatagccaggcatggtggtgcgtgtctgtggtcccagcttcttgggaggctgaggcaggaggattgcttgagcccaggaggtcgatgctgcagtgagccatgattgcaccactgcactccagcctgggtgaaaaagagaggctctgtctccaaaagaaaagaaaatgcataaagtatacaagagaaggcatcttgcatttgactccgggaaacttgtagtctaggtctcctgccaagatgctgcttcctcttcattattctattagatcaatgcttggaatctggaaactgcagagccggtattccatatcctgggagatgcctctgatccttggatgtgcatggccgtgctggcctcccaggccacactgctgacagtgtccagggatggtgtggtcagtctgtggagctcagctacgggaaaacttcaggggaagcaacatatgtccagcatcaaagaagaaacacctacctgtgccgtctcagtccagaagcaaggaaagcttgttaccgggtttagcaatggctccatctctttggtaagcacctttactgactatgatgtgaacattaactcagcttgaaagtgctcagatgtgctagaagttgggaaaaataatcttgccttgtatctttgttttgttttggagatgaagtttcacttttgttgcccaggctggagtgcaatggtgtaatctcagctcactgcaacctccgcctctcgggttcaagcgattctcactgcctcagccttccgagtagctgggattacaggcaagtgccaccacgcctggctaattttgtgtttttagtagagacagggtttctccatgttggtcaggctggtctcaaactcccaacctcagatgatctgcccacctcggcctcccagagtactgggattacaggcatgagccaccgtgcccggccacacgcttggcttcttaatcgtagggatttgcagttcagcacagttcaggaaacatctgttggcgtctcttggggactgaccaatgtgggcaattgttgaagctcagtccttcaggggatctctaagacatggtgtggaatgaggttgagagttgcgccacagagggactaggagttgggctctatccacctgccctgttggtggttggtggacggctgctttcatggacattaacatatagactggctgggcgctgtgtctcactcctgtaatcccagcactttgggaggctgagggggggtggatcatttgaggtcaggagttcgagaccagcctggccaacatggcaaaaccctgtctttactaaaagtacaaaaattgaccaggcacggtggctcacacctgtaatgccagcactttgggaggccggggcaggtggatcacctgaggttgggagttcgagaccagcctggccaacatgaagaaacctcatctctactaaaaaagcatacaaaaaattagccgggcgtggtggtgagcacctgtaatcccaactacttgggaggctgaggcaggagaattgcttgaacctaggaggtggaggatgcagtgagccaagattgcaccactgcactccagcctggacattaagagcaaaactccatctcagaacaaaacaaaaaacaacagcaacaaaaacaaaagcccaaaaattagccgggtgtggtggtgggtgcctgtgatccctgctactagggaggctgaggcaggagaatcacttgaacccgggaggtggaggttgcagtgagccgagatcatgccattgcactccagcctgggtgacagatcaaaactccatctcaaaaaaaaaaaaaaaaaaagaaaggaatcatggtggtgcatacttgtactcccagctacttgagaggctgatgtgggaggatcatttgagcttaggaggtggaggctgcagtgagccaagattgcaccactgcactccagcctgagtgacagagccaggccctgtctcaaaaaaattaaaaaataaaaaaaaaaagaaaagaaaagaagaagaagaatcatcccaaatcccaaagctccacatttctgaacctcatgacctgtggtcttcatgagttctcaaggtaccaaatacaacaacgaaagatactcccaaatccttggggttgtttttctttttctcaagcctctttgcagatattttgttttgttttttgagacagggtcttactttatctctcaggcgggagtgcagtggcacgatcatggctccctgcagcctcgacctcccgggctcaagacgtcctctcgcctcagcctcctgagtagctgggactacaggcgcatgcccccatgcctggctaattattattattattattttgtagaggtgggggtctcactatgttgcctaggctggtttcaaacttatgggctcattcagccttccaaagtgctgggattacaggcgtgacccactgtacctggccagaatttgttttttaccttttttttttaactgtttttttgttttttggtttttggttgtttttttttttgagactgagtcttgctctgtcgcccagactggaatgcagtggcgcaatctcggctcactgaaacctccacctcccagcttcaagcgattctcctgcctccgcctccccagtagctgggactacgggcatgtgccaccacgcccggctaatttttgtatttttagtagagatggggtttcaccatgttggccaggatagtctcaaactcctgacctcgagtgatccacccacttcggtctcccaaagtgctgggattacaagcatgagccgccacacctggccaacttttatgtttttaatttaaaaaattttttagagacagagtctcagtctgtcaccctggctgcaatgcagtggcacaatcatagctcactgcagcctccaactcctaggggcacaagtgatcctcctgcttgagcctcctgagtagctgggaccacaggggtgtaccaccatgcccagctaaaatttttattaagagatggagtcagctaggcatggtggctcacgcctgtaatcccagcactttgggaggccaaggtgggcggatcacctgagatcaagagtttgagaccagcttggcccacatggtgaaaccccatctctactaaaaatacaaaaattagccgggcatggtggcaggtgcctgtaatcccagctacttgggaggctgaggcaggggaattgcttgaacccgggaggcggaggttgcagtgagccaagatcataccaccgcactcctgcctgggagacagagtgagactccatctcaaaaacaaaaaaaataaaaattaaaaaattaaaaaattccagacttgtaacccttaacccgtggaagtgcctgacaggcatccctggttctgcacaggtttcctccaaaggggacagattgctggagaagcttccagatgctgtgaggttcctggtggtctctgaagatgagtccctcctcgccgcaggtagcgtttagctctcatttggagtagtgaggaagctaatcaggatcaggttggagaagggggtggggcttgggaacagagagaagtcctagggccagaggttagcaacgttttctgccaaatggcctcatagtaaacattttttgcagtccagacgagacaacctcagttgcaaagactcaactctgcagttgtggtacataaactagcatagacactatttttctattatttttcttttttttttaaatagggtcttgctgtgtcacccagactggagtggagtggctcaatcataattcattgcagccttgaatttctgggctcaaacgatcctcccacgtcagcttcctgaatagctgggattacaggcacacaccaccacacccagctaatttttgtatttttagtacagacggagtttcaccatgttggccaggctggtctcgaattcctgacctcaggtgattcgcccaccttagcctcccaaagtgctgggattacacaggcgtgagccattgcgcccagccctttctttccttttgatgcaggatttttcttggcctctttgccaagctgggagcagggggcaccccatttattcagcctgtggggtcacatctggcttttggcccagcccgcggctcccatggccactgccacgactgagcactcagcccctagcaggagggagcatgtgagcaagtgaatgtagggtccagctggctgcttcaagcactgacacagggccaggctccatgcagggcccatgggcagaccaggccatgtgtcaccccaaaggaaacacaaggggtccacgaccctgaagccccagagggggtgttacagtgtgctaattacctttttttttttttttttttgagaccgagtctcgctctattgcgtaggctgtagtgcagtggtatgatctcagctcactgcaacctccacctcccgggttcaagcgattctcctgcctcagtctcccaagtatctgggattacaggcacctgctaccacgtcccgctaatttttgtatttttagtagagatggggtttcatcatgttggccaggctggtcttgaactcctgacttcaggttatctgcctgcgtctgcctcccaaagtgctggaattacaaatatgagccaccacacctggcctaatttgctcttttagttccaccatctgcaacccaatggatggtggcatgttagcagttcagtcagcccctttccccattctggcctgcagttctgggactggcttggccccaccactgcttctattgcgtggagcagcttccctctgccatcaaggacagagggccacagtgtcacagccttcctgggtacctgcatccagtgagtcctaagctcttgtcccgtgtccaagaagaatgaggtcatgctgacaattgaaaagtgataaggacagagaattttattgagcaacaaaacagctctcaggggagaggggatgtgaaggttgggtcatctctctcagtgtggctgagtctgggcgtttttataggcacaggatgggggaggggcaggtggtaggtagtattggaaaacgtaacattcaattggttaaaaagcattattcaggccaggtgcagtggctcacgcctgtaattccagcactttgggaggccaaggtgggccatcacctgagatcagaagttcagatcagtgaacttctgatctgaacttctgatgatcatggtgaaaccctgtctctactaaaaatacaaaaattaactgggcatggtggcaggcgcctgtaatcccagctactcgggaggatgaggtgggagaattgcttaaacccaggaggtgaagattgcagtgagccaagatcatgccactgccacaaaagtcttattcagaaagaatcaatcaggaaagggtgggcaaacaggaacaggagttctcactctgggttgtggatttcatttggaaacagcagcccaggctgtttttggttcaaaggtacagtttcactggggacccattcctatctgcctaggcatttgcctgcctcctgccgctatcccttcctttctcccttcttactttctttcctcttcttccttccttcttccccttctcatttctctccttcctcccttcctctttacttttcttcctctctacctccttgactctcctctctccttcctcccttccttccatcatagttatcaaaggcctgctgtgtgcccagctttgtgctagtttctgagataccatgatgagccaaataggcagtccctgccctccaggaacttacagtttcattataataactttacaagtttccttaagatgagtgattactggctgggtacggtggctcaggcctgtaatcccagcacattggaagtccgaggtgggcggatcacttgagatcaggagtttgagaccagcttggccagcatggtgaaacctggtatctactaaaaaatacaaaatttagccaggcatggtggtcagcacctacaagcccagctactcaggaagctgaggcaggagaatcgcttgaacccaggaggcagaggttgcagtgagccaagatcatgccactgcactccagcctcagtgacagagcgagactccatctcaaaaaaaaaaaaaaattgatgagtgattacagaagtcaggccctcccccaaccagctgtgggctatgtgcagatggggacaggactgaatccaccttccccgtcctggatcccttctcctggcacctagcaggggttccaaaacatctcttttttttttttttttttttgagacagagtctggctctgttgcccaggctggagtgtagtggtgcaatctcagcttactgcagcctctgcctcctgggctcaagcaattctcctgcctcggcctcctgagtagctgggattacatgcatgtgccaccacacctggctaatttttgtatttttagtagagaataaaatacatgaaacatcggggttcaccatgttggccaggctgatctcgaactcctgacctcgagtgatctgcccgccttggcgtcccaaagtgctgggattacaggcatgaaccaccacatccggcctccaaaacacctctgttgatggaaggaatgaccctcaatctcctctggacatgagaggtgtaaccccagttcctgccgtttcaggctttggaagatcggtgcggatattcttggcggactcgaggggctttcgccgattcatggccatggatctggaacatgaagacatggtggagacggctgtttttggtactgagaacaacctgatcatcacggggtcccttgatgcgctcattcaggtgaggggagatctgggacccttcatcctcacctccacctcgggaacagacactgattctttagggatttttggctgcaaaatacagacacccacaaaaatgagtgcaggcaaaataggtgagttcattgggaggatatgggggtgtatcctccgccccagtggcagacctgggtgagaattactgaaatgttcaacaaaggaggtagcattcccaaactgatcctcaaaccttgggggcagatttgtgccttcagagtggagcagggttgtgggggaggaaaattctcaatttaagttcaaagttgtccaagctggagagaaaagtagatggtgaaatagcagatcttcagtgttttagtctcaggcctcttgaagttctctttttttccccctccttcttatgagctattttttccagttttaaagaaattgataaatagactgtgcacagtggctcatgcctgtaatcccagcactttggaaggccaaggcaggtggatcacttgggcccaggagttcgagaccagcctgggcaacatagcaagacccaatctctacaaaaaaacacaaaaattagccgggcgtcatggcatgtgcctgtagtcctagctactcaggaatctgaggtgggaggatcacatgagcctgggaggtagaggctgcagtgagctgtgattacgccactgcacttcagcctgggtgacaaaacaagaacctgtctccaaaaaaataagaataattttctttattttttgagaccaagtctcactcagtcgcccaggctggagggcagtgtggcatgatctcagctcactgcaacctcgacctcctgggttcaagcaattctcctgcctcagcctcgcaagtagctgggatttcaggcacccaccaccatgcctggttaatttttgtatttttagtagagacggggttccgccatgttggccaggctggtctcaaactcctgacctcaggtgatcagctgccttggcctcccaaagtgctgggattacaggcgtgagccaccatgtctggctagaataaaataattaaaaaaaaaaaaacattaaaagttttgagcttccagaccctctaaaaaaggtttacagggcaccctctaaaaaaggtttacagggcaccctccaggagttccctggaacacactttgggaactgctctggaagctgatgggttcaagcctgagtaagttaaaggaatgggaagatgtgaaggcccttgaacttacagcctgaaaattcaccttaggtttatgaatgggctgaagtgtatttcttattttcttatttatttatttttatttttattttgacggagtctcactctgttgccagcctgaagtgcagtggcgcaatctcagctcactgcaatctctgcctcccaggttcaagtgagtctcctgcctcagcctcccgagtaactgcgattacaggtgtgcaccaccacgcttggctgatttttgtatttttagtagagatggggtttcaccatgttggccaggatggtcttgatctcctgacctcatgatccacccgcctcagccttccaaagtgctgggattacaggtgtgagccactgcacctggcctatttatttatttttatttttattttttttgagacggagtttcattcttgttgcccaggcttgcgtgcaatggcacgatcttggctcattgcaaactccacctcccgggttcaagcgattctcctgcctcagcctcctgagtagctgggattacaggcatgcaccaccaagcctggctaattttttgtatttttattagagatggggtttctccatgttggtcaggctggtctcgaactcctgacctcaggtgatccacctgcctcagcctcccaaagtgttgggattacaggcgtgagccaccgcgcctggcccaatgggctgaagcgtatttctgaactatagttgtccacagaagatgtcagatctgccctcctgttctgcttcctcaggtgtggagtctgtcagaacaggggacccttctggacatcctggaaggcgtcggggcccccgtgagcctgctggcccgcggcggggctttggtggcatctgcttccccacagtcctcatctttcaaggtctgggatctcagcgatgctcataggtcccgggtgcctgcaccatttctggaccgcaccggcctcaccgcagtgtcccacaatggaagctacgtctacttccccaaaattggggacaaaaacaaagtcactatttgggacttggcagaaggttggtaaggtataagtatggtcatttttgtgggtaaggcttggagccatctgtcttagtttaggctactgtaacaaatcatccccacaggctgggccccatggctcacgcctgtaatcccaggactttgggaggccttggcgggtggatcacctgaggtcaggagttcaagaccagcctggccaacatggcaaaaccctgtctctactaaaaatacaaaagttagccgggcatggtggcacatgcctgtatccccagctacttgcgaggctgaggcagaattgtttgaacctgggaggcgaagactgcagtgagccgggatcctgactctgcactccggcctgggcgacagagtgagactctgtcccagaaaaataaaataaaataaattatccccatagactgggtggcataagcaagaaacattattcctcaacattctggaggctgggaagttccagatcaaagtgcaagcagatctcgtgtctggtgaggacccgtttcctggttcacagatggccatcttcttgatgtgtccccagagagagagagaaatctcttgtgtctcttcttataagggcactaatcctattcaggaacgccccacattcatgatctaatcacttccctgtcactctgctacagttcggaggtttggccctacaaaccagatgttggcatttaatatccggctggccatggtggcttaaacctataatcacagcactctgggaggccgaggcagtaggattgtttgagcttagggttcaagaacacctgggcaagatgagaggatgccatttctactaaaaatttaaaaaatagctggatgtggccagtcatggtgggtcacacctctaataccagcactttgggaggccaaggcaggcagatcacttgaggtcgggagttcgagaccagcctgaccaacatggaaaaaccccacctccactaaagcaatacaaaattagctgggcgtggtggtgcatgcctgtaatcccagctactcaggaggctgaggcagaagaatagcttgaacctgggaggcagaggttgcagtgagccgagatcacgccattgcactccagcctgggcaacaagagcaaaactctgtctcaaaaaaaaaattagctggatatggtggcatgtgcttgttgttctagctattttgggggctaaggtgggaggatcgcttgagcctgggaagttgaggctacagtgagtcatgatcgcactactgcactccagcctgggtgacagagtgagaccctgtctctaaaaacaaacaaaaaagccaggcgtgatggctcacacctgtgatcccagcactttgggtggctgaggtgggcggatcacttgagctcaggagtttgagaccagacgtctctacataaaagacaaaaattagctcggtgtagtggctcacatctgtagtccaagctacttgggaggctgtggtggtaggatcacttgagcccaggaggcagaagttgcagtgagctgagattgtgccactgcactccagcctggacgacagaacaagaccctgtttgaaaacaaaacaacaataaaaaaagaaatttaatccccagtgttggagggaggcctcacgggaggtgtttgagtcataaggacacatccctcgtggatagattaatgccctctcctggcaaggcagtggtggtggtgagtaagttctaactctgttagttctcgcgaggttgttaaaaagaacctgaccccagctactcaggaggcagaaacaggaagattgcttgaggccgggagttcaagaccagcctgggcaacatggaccttgtcgcaataaaaataaaaataatggccgggcatggtggctcacgcctgtagtcccagcactttgggaggctgagttgggtggatcacgaggtcaggagctcaagactagcctggccaacatggtgaaaccccatctctactaaaaatacaaaaattagccggacgtggtggcgggcacctgtaatcccagctgttcaggagggaggcaggagaatcgcttgagcccggcaggcagaggttgcattgagcaccattgcactccagcctgggtgacagagcaagactctgtctcaaaaataaataaataaataaaaataaaaataaaaataatgagctgggcatggtgatattcacctgtagtctcagctacttgagagatggaggcaggatgatcgcttgagcccaggaatttgaggctgcagtgaactgtgattgcaccactgcactccagcctaggtgacagagcaagaccctatctcaattaaaaaaaaaaaaaaaaaaaaaaggaagctagcacttccctctctcttgcttcctctggccgtatgacctctgcacaccccaacccccttcaccttttgtattaagaagaagcagcctggggccctcaccagaagcagaagctggcaccatgcttcctgtacagcctgcagaacaatgagccacataaacctcttattcataattatgcattactgtattagtctgttctcacactgctaataaagacatacctgaggccgggcctgctggctcacacctgtaatcccagcactttgggaggccaaggcaggcgcatcatttgaggtcaggtgttcgagactagcctggccaacatggtaaaaccctgtctctactaaaattccaaaacttagccagaaatcgcttgaacccaggaggtggcaattgcagtgagccaagatcttgctactgcactccagcctgggcaagagtcagactctgtctcaaaaaaaaaaaaaaaaaagacatacctgagactgggtaatttgtaaaggaaagaggtttaatggactcacatttgcacatggctgggaaggcctcacaatcatggcagaaggcaaatgaggagcaaagtcacgtcttacatggtggcaggcaagagagtgtgtgcaggggaattgccctttacaaaaccatcagatctcatgagacttattcgctaccacaagaacagtatgggggagactgcctccatgattcaattatctccagctggcctcggccttgacctgtgggaattattgcaattcaaaatgagatttgggtggggacacagccaaaccatctcagttacccagcctcaggtagtccttcatagcaacaccaacagacttagacaggccccagctcctaataccatcctatggggagtgaggattttgacataggaatttggtgggggggtggggacacaaatcttcagtccataacattcctataacttcaatcaggtagaaagtagctagtcaaaaacaggttttcattagcaacaccaatgaactaagacaggcccaagctcctgataccattccacagagggtgatgattttaacataggaatttgtcagggggacacaaatcttcagtccataacacgcctataacttcaatcaggtggaaactagctagtcatggccaggtgtggtggctcacacctgtaatcccagaactttgggaggctgaggtgggcggatcatttgaggtcaggagttggagaccagcctggccaacatggcgaaaccccaactctacttaaaaaaaaaaaaaaaaaaaattatctgggcgtggtggtgtgtgcctgtaatcccagctactggggaggctgaggcaggataattgcttgaacctgggaggtggaggctgcagtgagccaagaccatgccactgcactccagctttggcaacagagtgagactccaccacccgaaaaaaaaaagaaaaagaaagtagctggtcaaaaacaggatttcattttatacattttctgcatgaggtagttggcaatctggttgtttccgtttggcctgttttaattcaggttacctagaagctgaatctgtgatgaggatatttgcacaagtgatgtattgaggggtgtttccaggagaaccccagagggagatgagaaaatggggctggcgggggaaagggttgagcaagaatgcaggctcagctaaagtccctctcagcatcattccatggggagccctggaagaggtagagcaccagtcttagtcaattccggccactataacagaatgccatggattgggtggcttagaaagaatagcaaatggggccaggtgtggtggctcatgcctgtaatcccagcactttaggaggctgaggagagaggatcacttgaggccagaagttcgagaccagaagtttgagaccagcctgggcaacatagtgagaccccacctctacaaaaaaatttaaaaggtatcgggcttggtggtacatgcctgtagtcctagttactccagagtctgaggcaggaggattgcttgagccgtggagttcaaggctgcagtgagctatgataatgccactgcactccagcctgggcaacagagaccctgtctctctgtttttttttttaatttaaagaaagaatagaaatttgtttatcatatttctggaggaggctggggagtccaagatcaaggtgccagcaactttgttgtcttgggttaaattaatttttttttaaatttggtatctggtgagtgtcctctttctgggtcatggatggccagattttctttgtcctcacatggtagaaaggggcaaagaagctccctggggcctcttttttttgttgttctgtcttatttaagagtcagggctcactctactgtctaggctggagtgaagaggtacaatgacggctcagtgcagcctcgaactcctgggctcaagcgatcttcctgcctcagcctcctgagtagctggaaccacaggtgcaccaccatgcctgactcctggagactttaaaatttttaaaaatatttatttatttatttatttttatttttattttattttatttttgttgttgttcttttgtttgagatggagtctcgctctgtcacccaggctggagtgcagtggcgtgatctcagttcactgcaacctccgcctcccgggttcaagcaattctcctgcctcagcctcccgagtagctgagattacaggtgtgcagcacaatgcctggcttatttttgtatttttagtagagatggggtttcaccgtgttggccaggctagtctcgaactcctgacctcaagtgatccacctgcctcggcctcccaaagtgctaggattacaggtgtgcaccactgtgcccagccaaattttgtgtgttttgtagagataaggtctctctatcttgcccagggtggtcttgacctcctgggctcaagcaatctgcctgcctcagcctcccaaagtgctgggattagaggcgcacaccaccatacctggttaatttttttaatgtttttgcagaggcaggggtctcactcttttgcccagactggtcttgaactcctggtctcaagccatcctctcacttcagcctcctgaatagatgggattacaggcatgagccactgcacctggcatctctccatttccttgggccctggttcaccctgcaaccagcaaacaagcacctcgagaattgtaacctcacttgatttgctccctgccaacccccagagctttgcctagtgggctgttactctaaaaatgtttgccaaattaacgactgaatgaagttgagaatcagcttgaaaatcaggattcctttctcctattatttcatcattaacaaggagtttcttttttctttttctttcttttcttcttttttttttgagagggagtttccatctgttgcccgggctggagtgcagtggcgtaatcttgacacactgcaacctccacctcctgggttcaagcgattctcctgcctcagcctcccttccaagtagctgggattacaggtgcctgccaccacgcctggttaatttttgtatttttggtagagacagggttttgccatgttggccagactggtctcaaactcctgacctcaggtgatccatccacctcggcctcccaaagtgcttggattacagacgtgagtcaccacgccctgccattaacaggagtttctatacctctatcctcccagcaggactgtgccaagtactgttggtgagaaactcagaaatccctcactgtccaattctcgcagacccagcagtgcccccaccttcattttactcctgggaattgcccactgatgaaagaagcctctcaactggaaatggcagggggatgtggccaccgcccctgaaatggccccagtcaatgactgcctgatgtgggaatacaaaagtctggcccccttgcttcaagatgggacaattcatggtggctcatgcctgtaatcccagtactttgggaggcaaaggtgggaggatcgtttgagccctggagttcaagaatagcctgggcaacatggtaaaatcccatctctacaaaaattagctgggcgtggtggcccgagcctgtagtcccagttacttggggggctgaggtgggaaaatcactagagcctgagaggttgaggctgcagtgagccatgttcgtgccactgcactccagcccgggcaacagagtgagactccgtctcttaataaataaatacataaataggctgggcgcgatggctcatgcctgtaatcccagcattttgggaggccgaggcgggcggatcacttgaggtcaggagttcaagaccagcctggccaatatagcgaaaccccgtctctactaaaaatacaaacaaattagctgggcgtggtggtgcgcacctctagtcccagctacccgggagactgaggtgggagaattgctggaatctgggaggcagaggttacagtgagccgagattgtgccactgcgctccagcctggacaacgaagccagactctgtctaaaaaaaacaaaaaataaaaaaattagtagggcacagtggcaggcgcctgtagtctcagctactcaggaggctgaggcaggagaatcacttgagtccaaaagttggaggctgcagtgagcttcagtctcgccactgcactccagaatactgtctcaaaaaaaaaaaaaaaaagaaagaaagaaaatatgaacaccaggccgggtgtggtggctcacgcctgtaatcccagcactttgggaggccaaggtgggtggatcacctgaggttgggagttagagaccagcctggccaacatggagaaaccccacctttactaaaaatacaaaattagctgggcgtggtggcacacacttgtaatcccagctactcgggaggctgcggcaggaggattgcttgaatccaggaggtggaggttacggtgacctgagatcgtgctattgcactacagcctgggcaacagagtgagactccatctcaaaaacaaaacaaaacaaaaaaaaccaccagggaagcagggctgctgtgattcactctcagtgtaagtcattctcatttttcttccctggcaggcgaggaacaagattccctggacacctccagtgagatcaggtgtctggaggttgctgagcagcgcaagctcctatttacgggcctcgtgtcgggggtcgtccttgtgttccccctgaattccaggcaggacgtgatatgcattccccctcccgaggcccggaaagcaatcaactgcatgtccctgagcaagtgcgaggaccgcctggccatcgcctatgacaacatcgtcctggtgctggacatcacctccggggacccctgcccggtcatcgatgggccaagatacaccttttacactcagctgcccgagaccctctccagcgtggccattctgacggactaccgcgtggtctacagcatgaccaatggggacctctttctttacgagtgtgcaacttccaaagcgtttcccttggagacccacaggagccgagttgcctgtgtggaggtcagccacaaggagcagctggtggtcagcgggtctgaggatgccctgctgtgtctctgggacctgcaggcacgcaagtggaaattcgagatgagctacacggtgggtggcccgcctccccatgttcatgctagacccaggcattggaaaactgatagatagccatcatttactaagcacacaccatgggccatcgaccaggatgggactggggtgatgaaaatgaggcacttggtcaggcgcagtggctcacgcctgtaatcccagtacttttggaggctgaggcaggcggatcacctgagatcgggagttcaagaccagcctggccaacatggtgaaaccccgtctctactaaaaatacaaaaattagccaggtgtggtgttgcatgcttgtaatctcagctacttggggggctgaggcaggagaatcgcttgaaattgggaggcagaggttgcagtgagccaagatcacgccactgcactccagcctgactacagacactccgtttaaaaaaaaaagaaaagaaaagaaaagaaaagtgaggcatttgtctcagaagcaaagttttttttgttttcattttttttttaaagagacagggaccccactgtcacgaggctgtagtacagtggcacaatcatagctcattgcagcctcaatctcctgggctccagtgatcctcccgcctcagcctcccaaagcactgggatttcaggcatgacccaccggacctggctacaaagttcaaaggagtaccaaaaagctcagcaatggtaggccaggtgcagtggctcacccggcactttgggaggcccaggaaggaggatcacttgaggccaggagctggagaccagcctgggcaacatagggagaccttatctctacaaacaaatgcaaaaattagctgggcatggtgatgtgcacctgtgatccagctacttggagggctgaggcggaaggattgattgagcccggatgccactgctctctagcctgggtgatagagcaaggcctgtctcaagaaaacaaaaaacaaaaactcagcaatgaagataaataattttttttttttgagatggagtcttgctctgtcacccaggctggaatgcagtggcgccatctcagctcactgcagcctcccgggttcaagcaactctcccgcctcggcctcccaagtagctgggattacagataagcaccaccatgcccagctaatttttgtgtttttagtagagaaggggttttgccatgttgtccaggctgaactcctggcctcaagtgacctgccttggcctcccaaagtgctgggattacaggtttgagccactgcacctggccaagaagtaatattttaatgcaatatttttaaaaatctaaaatgaataccaaaattccatgaagaacaaaatctcaacattataggtaaaaactggatcaaatcctgcactggcttagtgctgcttcactctcttcaccctaatcctggctctgtgctatttctttttttttttctttttctttttctttttttttttttgagatggagtcttgctctgtcacccaggctggagtgcagtggtgcgatctcggctcactacaagctctgcctcccgggtttatgccattctcctgcctcagcctcccgagtagctgggactacaggtgcccgccaccacgcctggctaatttttttgtatttttttggtagagatggggtttcaccgtgttagccaggatggtctcaatctcctgacctcgtgatccgcccaccttggcctcacaaagtgctgggattacagtcatgagccaccgtgcctggctgctccgtgctatttctttatccaactgatacttattgaaaaacctctgccaggacccctttctatcacaagggttgcttttctatcacccctttctatctgcctggtcacagggagactctatcccatgtcttggagccactttgtagttgggaagacacagtgagctctgtctgggcaaaaggatttttttgtgtgtgtgttttgctcactgaagtttcccttgttcctaggagaactcctgacatttccttgatgctcaataaatggcaagggctgctgcttaagaaagccatgtaaggctgggcaccatggctcacacctgtaatcccagcactttgggaggctgaggcgggtggatcacctgaggttaggggttcgagaccagcctagccaacatggtgaaaccctgtctctactaaaaatacaaaaattagccctgcatggtggtatgtgcctgtaatcccggctacccgggaggccgaggcaggagaatcactggaacctggaaggcagaggctgcagtgagccgagaacacgccactacactccagcctgggcgacagagtgagactccatctcaaaaaaaaaaaaaaaaaaaagaaagaaaaagaaggccttgtaagtctagattaggcacagcaactcatgcctgtaatcccagcactttgggaggccgaggcagggggattgcttgagctcaggatttcaagaccagcctcagcaacacagcaagatcccatctctagaaaaaaaaattagccaggtgtggaggtgtgtgcctgtagtcccagctagttaggaggctgaggtgggaggatcgattgagccctggagttcgaggctgtagtgagctatgatctcgccactgcactccaccctggatgacgatacaagattctgtctctcgagcaaaactaactaataaacaaaaatgaagaaattaacatgtgaacagtactattaattaaactgtcaaccttatgggaattttttattttttgttatttattcatttatttatttttgaggcagggtcttactctgtgagccaggctgtagtgcagtggtgcaatcatagttcactgtagcctccgcctcctgggttcaggtgattcttccacctcagcctcctaagtagctgggactacaggcatgtgccactgcacctggctaattttttaattttttgtagagacagggtttcacccacccaccttggcttcccaaagtgctgggattacaggtgtgagctatcacatccagcctttattggaatcttaccagcttttcaattcattccttttttccattctagaatccaatccaggattccatgtgagattagcacatagcttttaattaaatacaatcatagctaacatccgtataaccaaagtaatttaagaaattgaatccccatcgaaaaaagaaattgaatcctatggccaggcacagtggctcatgcctgtaatcctagcactttgggaggctgaggcgggtggatcacttgaggtcaggagttcgagaccagcctgaccaacatggtgaaacctcatctctcataaaaatacaaaaattagccgggcatggtggtgcatgcctgtaatcccagctacttgggaggttgaggcaagagaatcgcttgaacccaggagatggaggttgcagtgagccaagatcgtgatattgcacttcagccagggcaacaagagcgagactctgtctcagaaaaaaaaaaaaaagaaagaaagaaagaaaaaagaaaagaaaagaaaaaagaaattgagtcctacaattgttcctttcagtgcaaaatgtatctaaacctttctatccaatctctatggaggtgtgcctgggttggggtagtatctgtgctgctcatctctccaggttttcattggatccatccccctgtggggcgcttcaaagcctggttctgaggtcaggagtttgggaccagcctggccaacatgatgaaaccccttctctactaaaaacacaaaaattagttgggcatggtggcaggagcttgtagtcccagctacctggaaggctgaggcagaggaatcgcttaaacccaggagacggaggttgcagtgagccgagatcaggctactgcacctcagcctcaggaacagagcgagattccatcaaaaacaaaaacaaaaaacaggcatagtggctcatgcctgtaatctcagcacttcgggaagccgaggcaggcagatcacttgaggtcagttcaccaccagcctgggcaacatggtgaaaccctgtctctactaaaaatacaaaaattagccaggtgtggtggcacacacttgtaatccctgctacttgagaggttgaggcaggaggatagcttgaaaccaggaggtggaggttgcagtcaagccgagatggcatcactgcactccagcctgggtcagacctgttaaaaaaaaacaaaaacaaaaaaaaggcctggttccttggggctggtttcctgggtgtctttcagtttggaatcaagatcatattgtctgggtcaggcacgttggctcacacctgtaatcccagcactttgcgagaccaaggctagtggatcacctgaggtgaggagttggagaccagcctggccaacatggtgaaaccccatttctactcaaaatacaaaaattagccaggcatggtggctcatgcctgtaatcctagctacttgggaggctgaggcaggagaatcgcttgaacctgggaggtggaggttgcagtgagctgagatcacaccactgcactccagcctgggcaacaagagtgaaactccatctcaaaaacaaacaaacaaacaaacaaacaaacaaaaaacccaagaaaaagagagatcatattgtctgttttcaacagagttcttactgcagaggggtccaatgtgcttgcttctccaaggatgacaagtatgtgtacgtgggcttaaaggatcgctctatacttgtttggagtgtgctggatggtgagtcattttgcttttagggcaggattgagcttcgatctggagagaaaaggctctgacctgggtcctgggcattagagggccctgctctggccacctctagctgcatcccttagcttttaggaaggtgtctgcaggcaaaggcaaagggcccacaatccctcttctagacccatgctctggagttcgagaactccctcccttgagttttcattagggcatgcacaggcttcctgcatacagccatccttccgaggatagactgggctcctggtgtgtgcacttctgggctcaggagtagccatggggtggtatggatggagtttgggtgtctgagttggttgtgagatggagctgagaagagtgagaagagggtcaagtcactagtagtggggggctggttacatcactacattccagcatagaaccctgaggagcccaagaattctcaatctgtttccaggtgtttgtgaaggttccttcatcaatataagaggacacagcatattctatttaatagtttattccctagaattgcaatgtttatatatggtgtcttcttggatgtgggtcttatttcattctttgcccccgccttatagatgttagaagcagcctgtttttgttttttgttttttgtttttgagatggagtctagctctgtcacccaggctggagtgcagtggtgcaatctcagctcactgcagtctctgcctcccaggttcaagtgattctcctgcctcagcctcctgagtagctgggattacgggcgcccaccaccacactcagctaatttttgtattttgagtagaggtagggtttcaccatgttggccaggctggtcttgaactcctgaccttgggtgatccacccacctcggcctcccaaagtgctgggattagagatgtgagccaccattcctggccagaagcagcctgttttaagaccaaccactttggaaacaccgtgtctcttggtctgttcagtattatgctaaggtcttagcaagagttaacactggctgggtgcagtggctcaagcctgcaatcccagcactttgggaggccgatgtaggaggactgcttgaggccaggagttcaagactagtctggacaacatagcgagactctgtctctacaaaaaaaaaaaaattaaaaattatccaggcatggtggtacatgcttgtagtcccagctactcaggaggataaagtgatcatgggaggtcgaggtgtgggagattgaggctgcagtgagccatgatagcaccattgcactccagcctgggcaacagagtgagaccctgtcaaaaaaaatgagttaacattttttgtatactgggtactgtccttaagtcatttaactctctcaacactcactcccatttacagagcaaaaactgaggctctgagaggctggcagacttgcctaaggtcacacagtgagtaactagtaggcttaggtttgaggctgaccttcctgatttcagtacgcctttgtcactttcttacactgtctcctatagaaaaggcgctcattgtgtattatctctttgaacccttatgacactagtaggagataagtatcattgctatccttgtttgacaatgaagaagctgaggatcagagaggttaggagacttgcccaaggtcacaaaacaagtaagtggctgaataaatatcaggtggagcctactacattgtagttgaatacactgtaatctgatacatagtaaactataacactattatacattgtagtataatatgctgtagcaaagatatatacaactggtataaagttacagatggctcagaagatgaaggttgaggactgtggccttaaaagcccatcctgggccagttcacaacctctcttccttctcctccttcaacaataatatttactgagctcactctgggccaaaaacctacactaagcacatgacctgcatgatgcctttcaatcttaaaaatcgccctgagcaggtgtaggttctgttatcattcccattgtgcagataaaggaagagggactctttggcataataaatgtcatgccaaaattagtagagggcatagcaggaattttattccatgcagccaactctggaatgtgtaggattggacctctacaccccatttttctcatttgtgtccttctcttcacccttacaggcaccctgctgacagtccagtttgtccatgctgtggtaaacagaatcatcccaaccaccagtggcttcattgcccccaccaggcatggttatctgatccgagagaatttccagtgcctttcagcaaaagcctcaccgcaggaccctcttaagaacttcaagaaggcaatgtggatggtcaaatccaggcagagagaggagctagttgcagctgcaggagctccccaggacttggagtcagaaagtgcccagggaaatgaaaccaaatcaaacaaatgctcacaagtgtgcctgatagtgtaaaaaaataaaaataaaaaaaccctgtgggggtatggggctccagtgagttagccccatttaatctagttaaagcaaaaagaatacgtttgctggtgtatatctggacccatggcttcagattatggcttcagaccttgtctcttctcatctttccattattctttcctctttttcattttcattctcagacttgccacccccaggttagcaacatggtggccaatatgctgctgtctccaatttcaatagaaaagagagcttctctttcccaacagtcctagcctcaactctactggtcccaattggcccatacgcctagccctaaaccaattattatatctgggagaatgcagagctctaatcggctagactgatccaatgtccaccactgggactgagaatagaagagattactcctgagatgcaaactggagttctggtaccagatgaagggggaacggatgaatgtgagatacagcaaatcactgatgtggaccacagaacctcacagtttataaagctgtaggtgctgtcatctgatcctcatcacaactcatactttagggagggcaggagtttctgtatctattttacagatgaggaaactgagccttgcggaagtagttataatttgattcaggtcacaagtccaaggtgcaagagctctgagagtgagccttctgtcccattcctgttagacctcactccaatttcagtctgcagagcacaaccatctcttccacaggcaccacactcaaatgctcacaggagctagtgactaatctagacacttccatgcacctgggtgagcagcagggagagacagagactggacatgtggaaggcagagattgtgtctagggtgggtatgagcagcctgactgtagcccagaatcaccatggccaaacaagcccactgctgtcagtgcttccagttgtaataagcaaagccagaaatccagacttttatgcaaaaatgttctgacttttaaagttggcgattggttgaatttatatctatagtgcatttggcatgtgcgtctttggttaatgagctgacttcaggactcacgctggcagtaaaacaatcaacatgttatagttcatccctctctattccttggctcccaaacttttgggataaagatgtgggtttttaatcttaaaaactggaggctcttggaagtagaaagagctgctgatctctccctgctttgcttttgaactgtctgccttgtgcaagttcaacagtcaaactgttttcattccacttaagtggatctttcttctttgcccacagccttctaaaagcccttctcagtcttctcaggcttttactttaatgctaggatagtctaaatcttcaaggtggctatcccttctcccctccgtggaattcctgatagagtctcaataaaagcaaccttagaaacagaggcttttgagctgaacaagaccctactgctgtcttattcatccattttccaaaccagttttccaaggcaggttttggtagttctgcaaatgttagtgtcaaatttcatttaaaaatattttaaactgtaattttaagatgtatgcttggatgtattgggcagcagcttctaaggtgttgaagattactaaggttggtgcaaaaagtaactgtggttttcgccattaaaaatattaaaaataatggcaaaaactggctgggcacagtggctcacacctgtggtcccagctctttggaaggccgaggcaggtggatcacctgaggtcaggagtttgagaccagcctggacaacatggtgaaacccttctctactaaaaatacaaaaatcagccaggcatggtggtgagtgcctgtaatctcagttactcaggaggctgagtcaggagaatcacttgaacccgggaggcggaggttgcagtgagctgagattgtgccactgcactccagcctgggtgacagagcaagactccatctcataataataataataatggcaaaagcctcggtggctcacgcctgtaatcccagcactttgggaggctgaggcgggtggatcacttgaggccaggtgttcaagagcagcctggtcaacatggtgaaactctgtctctactcaaaaatacaaaaattagcctggtgtggtgacgtacacctgtaattccagctacttgggaggctgaggcaggagaatggcttgaacccgggaggcggaggttgcagtgagccgagatcgcaccactgcactccagcatgagtgacagagactctgtctccaaaaaaaaaaaaaaaaaaaagtaatggcaaaaaccacaattaattttgcatcaacctaataatttaggattcttctgccattttcatttaactgatttaactgaagagcccaattaaattgtgaagggagccctgaaaaaattagctactctttgccactgcttctctgtgaatcaagggcttacccaatgcagaaataaagtagatgttgagaccaattaagatttcacctacaaattctgattttaaatgcctgtgtccatctccacagcctcagtgagaattgattgttttgtagataaatcctaatttaaacattggaaatgcctttttactaataaaatgctacaacaaattattgcttatattgggagtttttgcagtgtttattcatttgaaaaagagtttggttgctaagaaagtttgacagttggctggtcaatgcttgtaatcccagcactttgaaaggccaaggtagaaggatcacttgagcccaggagtttgagaccctgtctctccaaaaaaaaaaaaaaaaatttttttttaattagctgggcatggtggtgcacacctgcagtcctagctactcagggggccaaggtgggaggatcacttgagcccaggagatcaaggctgtagttagctatgatcgcaccactgcactctagcctgggcaagagagtgagaccatgtctcagaaaaaaaataaaataaaattaagggatgccgaaaagctcagcaatcatgacaaataatgttttctctctcttttttttcttgttttcttttcttttggaagacaaataatattttgttatcttttttttttttttttgtcaaggccttgctctgctgccagactagagtgcaatggtgcgacctcggctcattgcacctctgactcctggattcaagcgattctcctgactcagcctcctgagtagctgggactacaggccaccacgcccagctaatttttgtattttttgtagagacgaggttttgccatgttggccaagctggccctgaactcctgacctcaagtgatctgtgctcccttggcctcccaaagtgctgggattacaggcatgagccaccgtgtgtggcctattatcatatttttaaaaatcaaaatgaatttaaaaatgaatgatgaacaaaacatcaacattctatataaaattggtatctgaccctgcatttgcaggaactgacctcaccctcttcctggccctggggacatcaagacacctcacccctacatacatcagacaagtgtcttaggaaggtcatattcctatataagcacacacacctgtgagaattactaattgttagttaatatcttttttatttttcagagagggtctctctctgtcgcccaggctggagtgcagtggtatgatcatgggtcactgcagccttgaacttatgagctcaagtgatcctcctgcctcagcctcccaagtagctgaaactacagatgtgcacaaccatacctggttaatttttaaatttattgtagagagggtgtctcactatattgcccaggctggtctccaactcttgggctcaagcgatccccccagtgtgctgggattacatggcgcctggccatcagaaatatttctaatctggccctttaccaaaatatatatatatatttaccaaatatatacgtgtctatatatatacatgcacatatatacacatatatacacacacatatatacacatatatatacacatatacatatatacgtatatatgtgtgtatatacacacatacatatgtatatatgtatatatacacatacatatgtatatatgtatatatacacacacatatgtatatacatatgtgtatatgcacatatatacatacacacacacacacatatacttatgtatatatgcctacccttggtcttaaagcttggctaaatttagggtaaacatcttttatataggctttctttttttagagtagttttaggttcacagcaaaattaagtggaaggtgcagagatttcccatctaccctatgcacccctcatgcacagcctcctccatcaacatccctcactctaacaaacgcagagcggtgcatttgttacaatggatgaactcgcattgacacttccttatcagaggagagacaattttttttttttgagacggagttttgctcttgttgcccaggctggagtgcaatggtgcgatctcggctcactgcaacctccgcctcccgggttcaagccgttctcctgcctcagcctcccaagtagctggaattacaggtgtacgccaccacaccaggctaatttttgtatttttagtagagacagggttttgccattttggccaggctggtctgaaactcctggcctcaagtgatccacccgacttggcctcccaaagtgctgggatgacaggcatgagccactgcaactggcccaggatagacatttttgacaagtatacttcataggtgtgtccattctccatcactacttagtaaattattgcaaagttagaagcttaaaataacatccacttcttatcttacaatttctgcaagtcaggagtctgggcatggcatgactggattctttgttcaggatctcacaaggtgtcagccggactgggctctcattgagagcctcagggtcttcatccaagctccttcagattcttggcagaattaagcccttcaaagctataggagtggagacctcagctgcccctctccataggcagtttgcaaaacagctgcttccttcttcaaggccagcagcattgtatttctctgatgcttcatctctgacctcaaactcagactcagactcagactcagattgtcttttaaaaaaatttttttttggccaggtgcagtggttcacacctgtaatcccagcactttggaaggcccaggctggcagatcatgaggtcaagagatacagaccatcctggccaacatggtgaaaccctgtctctactaaaaatgcaaaaaattagctgggcatggtggtgcgcgcctgtagtctcagctactcaggaggctgaggcaggagaatcagttgaacccaggagatggaggttgctgtgagccaacatcatgccactgcactctagcctggtgacagagtgagactctgtctcaaaaaacaaaaaaaatttttttagagatgaggtcttgctgtgttgcccaggctggtctcaaactcctggcctcaagtgatccgcctgcctctcaaagtgctgggattacaggtttgagccactgcacctggcccagtagcacctttttatgtttgataaaaataagaatatccagcctaggcaacttagtgagaccctgtctgtaaaaaaaataaaaataaaaaattagccaggcatggtggcacgtacctgtagtcctggctactcaggaggtcaaggctgcagtgagctgtgattgcaccattgcactccagcctgggcaacagagcgagtacctgtttcagaaaataaataaatggaaataaaattaaaagatgtctttgtactattgtcctcatgataaatatacacatgtgtgcacatacatacatgtacacacatgccccagatggaactggcttgtggttttgtcagaggcgtttgaaacaagcttactccatctagaataggggctgggtaaaatgaggctgagacctgcagggctgcattcccgggaggttaggcattctaagccacagggtgaggtaggaggtggacggaagacccaggtcacaaagaccctgctgataaaacaggattctggggcggggtgggggtcggggggcattgtttgtttgtttgtttttgtttttgtttgagacagagtttcgctcttgttgcccaggctagagtgcaatgaatggcgcgatcttggctcactgcaaactctgcctcctgggttcaagagattcccctgtctcagcctcctgagtagctggtattataggcacatgctaccatgcctggctaatttttgtatttttagtagagacggagtttcatcatatttatcaggctggtctcgaactcctgacctcgggtgatccacctgcctcggcctcccaaagtgctgggattacaggcgtgagccactgcgcccggcccatgcagggtttttgttgttgttgttgttgttgttgtttttgagacagagtcttgctctgtcacccaggctggagtgcagtggcatggtcttggctcactgaaacctccacctcctgggttcaagcgattctcctgcctcagcctcctgagtagctgggattacaggcgcccgccaccacgcctggctaatttttttttttttttttgagtaaagatgggggtttcaccatgttggccaggctggcctcgaactcctgacctcaggtgattcgcccaccttggcctcccaaagggctgggattacaggcgtgagccaccgtgccgggccaggatgcagggttttatcagcatggtgtgaaagtgacctctggttgtcctcactgctcattatacactaattataatacattagcatgctaagagacactcccaccagcgccatgacagttacaaatgccatggcaacttccagaagttaccctataggttctaaaagggtagggacccctaagttctgggaaatcttcgccccttttctcagaaaactcatgagtaatccatcccttgtttaacctataatcaagaaataactgtaagtatatgcaatcgagcagcccatatcactgctctgcctgtggagtagccattcttttattcctttactttctttttcttcatttttaaaatttatttttattttttgagatgcagttttgctctggtcacccaggctagagcgcaatggtgcgatctcggctcactgcaacctccgcctcccaggttcaagtgattctcctgcctcagcctcccgagtagctgggattacaggcgtccaccaccatgcccagctaatttttgtatttttagttgagacagggtttcaccatcttgaccaggctggtctcgaactcctgaactcaggtgatctgccttcctcggtctcccaaagtgttggaattacaggcatgagccactgcacctagccttttttctttttttttgagacaggatcttgctctgtttcccaggctggagagcagtgacacgaccatggctcactgcagccttgacttcttggactcaagcaattctcctgcctcagcctcccaaatagctgggactgcagacgtgcaccaccacgccaggctaattttttgttttgttttgtttgtttgtttgttttttgtagagaaaaagcgatctgtctgccttcgtctcccaaagtgctgggattacaggcgtgagccacctggcctcctttactttcttaaacttactttatggacttgtccagaattctttcttgcatgagatccaagaactctctcttggggtctggatgaagaccccttttcggtaacagtttcctcttccccaaatgaaagagggcctttgctgatcatttgagagaaaacaaatttgagtagaagccacactccctgtggggaggggcacactgtgggacaactctgttggccctcaaggacgatgactaataggttgctgatgtcagaggcatttgaaccagagcaacaacatcttgaataggggctgggtaaaataaggctgagacctactgggctgcattcccagatggttaggtcattctaagtcacaggatgagttaggaggtcagcacaagatacgggtcataaagaccttactggcctggcgcggtggctcatgcctgtaatcccagcactttgggaggctgaggtgggtggatcacctgaggtcgggagtttgaaaccagcctgaccaacatggagaaacctcgtctctactaaaaatgcaaaattagccgggcctggtggtgcgcacctgtaatctcagctattcgggaggctgaggcaggagaatcacttgaactgggaggtggaggttacagtgagccaagattgcgccattgcactccagcctgaataacaagagtgaaacttcgtctaaaacaaacaaaaacaaacaaacaaaaaaaacctagctgataaaatagcctgcagtaaagaagccagccaaaaccaagatggagacaagagtggcctctggttgtcctcactgctgtactcctaccggtgccatgacagtttacaaatgccatggcaacatcaggaagttaccctatatggtctaaaaaggggaggcataaataatccaccccttgattagcgtatcatcaagaaataactggccaggcgcggtggctcatgcctgtaatcccaatactttgggaggctttggtggatagatcatttgaggtcaggagtttgagaccagcctggccaacatgataagacccccgtctctaatactaaaaatacaaaaattagccaggcgtggtggcacgcacctgtaatcccagctacttgggaggctgaggtaggagaatcgcttgaacctggaaggcagaggttgcagtgagctgcaatcgcgccactgcactctagcctgggcgacagagtaagacttcgtctcaaaaggaaataaccattaaaatgggcggccaggcgctgtggctcacacctgtaatcccagcattttgggaggccaaggtgggcggatcacgaggtcaggagatcaagaccatcctggctaacatggtgaaaccccatctctactaaaaatacaaaaaaaattagccaggtgtggtggcaggcgcctgtagtcccagctactcgggaggctgaggcaggagaatggcatgaacctgggaggcggagcttgcagtgagccacgatggcgccactgcactccagcctgggcgacagaacgagactctgtctaagaaaaagggcaaccagcagccctgggggctgctctgtctatggagtagccattctttagtcctttactttcctaataaacttactttcagtttactgtatggactggccctgaattctttcttgcgtgagatccaagaaccctctcttggggtctggattgggacccctttcccgtaacagtgtcagaggtgtttgaaccagaggaaccccgacttgaataggggctgggtaaaataagactaagacctactgcactgcattcccagatggttaaagcattcttagtcacaggatgagataggaggtcagcacaacatacgggtcataaagaccttgctgataaaacaggttgcagtaaagaagccggccaaaatctacccaaatcaaaatgacctctggtggtcctcactgctacactcccaccagcgccaagacagtttagaaatgccatggcaacgtcaggaagttaccctctatggtctaaaaagaggaggcatgaataatccaccccttgtttagcatatcatcaagaaataaatcataaaaatggggaataagcggccctcggggctgctctgtctgtggagtagccattctttgttcctttattttccttataaacttgctttcactttacagactctccctgaattctttcttgcgtgaaatccaaaaaccctctctggggggtctggatcgggacccatttcctgtaacactgggaggctttggtaagaaacggactgtccagacatctggtggccacagagtgttcagtctgccttcgctgctcttcctggctgggagccacaaatcttccatgctttactttctaaataccactcccttccacccaccgctctctacttccactgctcccatcctggtctaagccaccatcgtcctttgcctaaatgatgaaacagcctccctccaccctccctggctccgctccaatcactttcctgcagagcagccagagtgatcactttcaaatgcaaacctgaacttgcagctcctccgctcaaagcccttggatggtttccaccagcgtgaatgctaaagcctgaactcagtgcataaggtgctgtgtgttccgctcctctggctgctccgggattatcttgtactctctttcttcccctccctctctgcagcctgggaaactcgtcttaaaaaaaaaaaaactcttgaaatgtaccatgctgtctcccacctcaaaaatcacagctgttcgtgatttttctcatgatgaatgcctacgcattcttcagatctcagctagaatgccacctcctctgggaagcctccctcatctcctgcaagactgggttaggtttccctaggtaacaggtggtattttccaaaaatagccacaacatatttcctgtcccacatgatactcttggccatttgccctcctcttgaatttaggaaaaactttgtaacagcctgtatggaaagaatgcaatggaaatgattctgcgtgacttccgagtctgggtgagaaaaggtaatatgggagctgggtgcagtgatgcatgcctgtagtcccagctactcaacagattgacgtgggaggatcctttgagtccaggagtttgaggccagcctgggccagcctgagaccctgagtcccaccccaacccctgccatctccggaagaagaagaaggagaaggagaagaggaagaagaagaggaagaggaagaagaaaaagaaaagatgatatgattcccacctggctcacacgctcacttgttcttagaacggtagttgtgaagaagctcaggctgcaaggagaccacatgtaggtattccaagcaacggccccagcgagggtctcggcctgtagcctgtagcaactgacatacatatgtgtgagcaaacattcaggtgattccagcccccagactttgagccacccagctgatgccaaggttgagttattcctcccaagcctgcccaaattgcagattgaagagtaaaatgaatgtctcttttctttctttttttttttttttcaagacagggtcttgctcttgctctgttccccaggctggagtgcagtggcgcaatctcagctcattgcaacctccaccttctgggttcaagcgatactcatgcctcaacctcccaagtagctgggattacaggtgtgtgccaccacacctggctaattattgtatttttagtagagatgggatttcaccatcttgtccaggctggtcttgaactcctggcctcatgtgatccacccacctctgcctcccaaagtgctgggattacagccatgagccacttgccccgtgaatgttgttgtcatttgaagcttctaagtcttgagctgctttttattttcttttacagaaagcccagaccttacaatgtttttattttttctctccatttttctttctttttaatgtttttgtacagatgggatcttgctatgttgcctgggctggtctcaaactcctggcctcaatgcatgcccccaccttggcctcccaaagtgctgggattgtcaagggctcatttgttacacagtcatagcaacagaaatttaggaactgttacatgtataccttctctttaaagtatttgttacatgtgaaactttacatttgtgtgattactagattcctgtctatcctgagagactaaaagctcttaacggccaaatttgcgttcctttttaccattctattcctgacacttagcaaggtgcctggtaaatgatgcactcgatgccaatttactctcaactttcctgcacctcttcacttataaaaagagaaagcacttggtcattaattgaacgttcacttatttgatgaatgctgactgagagactgtgtcagggatttgtattagagacggacacaaaacaaatatgaaatacaagggactgaggggagacatagaaggggactgggaacacttcctgagggaaagggatatttgggctgcgtttagaaggatgtataggtgttttctgaataacaaagaggcatgacagtacttctggcaaaggaaatggtgagtgccaatgcttgggaccaggaagcagccaggttggtcaggcaattgtgtgaagttctgcacagaggcaggcagtttgcttggaaaatcctgcaggaaaaggttcctaaggaccaattctgacagcctgcaatgtaggtgcttagatttcatctcattagaaataggaagaccttggaggtttggaaggagtggtggaaaaagtggagttttttgtttttctgtttttttttttttaagagatgagatgctctttaaaaaaaaaaaaaaaaaaaagcactgctatgcttcccaggctggggtgtgcagtggcaagatcatggctcactgcagccttgaactcttgggcatgagcaatcctgcctcagcctcccgagtagctgggactaaacgtgtgcaccaccacgcccagctaattttttcattttattttattatttaattaattaattaattaattttttgagacagagtttttgctcttgttgcccaggctggagtgcaatggcgtgatcttggctcactgcaacctccgcctcccgggttcaagcaattctcttgcctcagcctcccgagtagctgggattacaggcatgcgccacaaagcccggctaattttgtatttttagtagagacggggtttctccatgttggtcaggctaatctccaactccagacctcaggtgatctgcccgcctcggcgtcccaaagtgctgggattacaggcgtgagccacggcgcccagccaattttttcattttctttttctttttttcaaggcccggctaattttttgtatttttagtagagacggggttgcaccgtgttagccaggatggtctctatctcctgacctcgtgatccgtccgcctcggcctcccaaagtgctgggattacaggcgtgagccaccatccccagcctagagttcttgatagtatcagggctgagaaagtaccagagttagagccaggtggggtggcactaaaagtacaaaaaattagcagggcgcagtggcgggcgcctgtagtcccagctactcaggaggctgaggcaggagaatggtgtgaactcgggaggcggagcttgcagtgagcggaaatcgcgccactgcactccagcctgggcgacagagcgagactctgtctcaaaaaaaaaaaaaaaaaaaaaaaaaaaaaaagaaagtaccagagttaggaggctcctaaactggtccagatgggaagtgacggggccaaggatagggaagtgaagatgggaggagtaggactaacttaaaggccatttagcaaaaattcaccacgcaaggccctatattagggcgctgggggctcatacctcatcgtcccgtcaactctataaagcaggggccaacaaactttttccataaaaggccagatcgtaaatacttcagggtctgcagatctgtaggatctttagcaactacctactctgttgtaaggcgaaagcaggcagagaagccaggtaaacgcgtgggcgtgtctgtgtgctaataaaactttattcagggaccctcaaatgtgaatttcacaaacttttcacaggtcatagactattcttctttggatttttcccccggctatgtaaacatgtaaaaataattctgagcttgcggggccggacaaagtaggcggcgggtcttggctcgcctacccctgctatataaatcattaattatgataccaatcttaaggagaaggtcttcagaagagtccctcaaagagcaccgcccctcaacgtcatcaaaccccgcctccaaaggcggaggctgcgcatgcgcggcaggacctcgggcgggggcggggcggggcgcagctccgacttcggacatggcgcacgctggcggtggcagcggtggcagcggtgccggcggccccgcgggccgggggctgagcggcgcccgctggggtcgctcgggctccgcaggccacgagaagctgccggtgcacgtgagtggcgtccccgccctccctcggggaacccatcttctggaccccgcgggcgggcgcccctcacccaggccccgcccggccccagccccacctcggcctcccctctgcactgccccggacccctcacccctcacctctcacctcggccctccgaaagcccagcccatccccttcccctcagggaccccggcccctcgtcccctcgttccgcggccagggcccaccgggaccctccccctctctgcaggtagaagacgccctcacctatctggaccaggtgaagatccgctttggcagcgaccctgccacctacaacggcttcctggagatcatgaaggagttcaaaagccagaggtaccagcggggcccctctccacctcaggggacccccctgggccggaatcgggcctagcggggtgagacctcccctctccagcctgcccccttagccgggtgaccttgcgcaggttgtccaatctctcagagccctagctccttctcgtaacaaaaatggaaatgggtagtacccaccttgtggagctttgtggggattcctggaagcaggacagggatctggggggaggcagggagggcgaggccgtgcacactcatagagtcaaatcctgccttgatttaatatgttgatttttatattagttttgttcatgaaagatttggtgggacccattttgatttttattttcaagcgctgtaaaatgttattgtcttgatgattgaaatttttggcaccctcttcccctttaatcttgtcctcaagatgcttctctgggctcactgtggtcccaggcctgcttggaagtaagacgcataaaatgcttagtaagggagctggcacacagaaaacgtttaaaacacatgagatgattttgcaggcccagaatcaaggaagattacagatagatgggaaaccctgggatcatgcccttgtttttataggagactcactgaggtttggagtgggtaagggacccacctaagtggcagaggtgtcactagaactcagaccctctgactcagattcttggaagtcacatgcttaccatactgctgccccctcttaggaaacatggtggggctggcctggtttccttccgggagcccagtgctaagggctgggctgcaatgcagccagaagggagaccccatctctcccctcctatttttcttacacctttcccattcttggcagtaccattggtatttatgcattgcaattgtttgctcagatggaaacctgtgtcatagtcatctctatctgatacaaaatgagggaagttttcacattgcttagaggactttggcctcctgccatttcttggagtccaggccttgcggttggctctcctgacattttcagaaccgagtacccattcttggagtgttttaggggagctgagcgatgtcagtattctctggttctcaccaggagggaacagggagctcaggcctagccagtcaggagataggtcatggtgtacagatgctatcacatgggggcacttttttttttttttttgagatggattctcgtgctgtcgcccaggctggagtgcagtggtgtgatctgggctcactgcagcctccgcctcccgggtgcaagtgattcttgtgcctctgcctcctgagtagctgggactgcaggcacgcaccaccactccaagttcgtttttgtatttttagtacagacagggtttcaccatgttgaccagtctggtctcgaactcttgacctcaggtgatctgcctgcctcggcctcctaaagtgctgggattacaggcatgagccactgcgcctggtgggtcacattttaggttcctttgttgtctgttgagaaggtttttatgtggcagtatcaagggagtggggaatagattatatttttcatttatttcccaagacccttttgcccacttccgttgtttcttctagcatcgatactcctggagtcatcagacgtgtctcgcagctcttccacgagcaccctgacctcattgttggattcaacgcttttcttcccctcggatatagaatagacattcccaagaatggcaagttaaacatacagtcgcctctgacaagccaggtatgccactacagtggttcgggtgatctcagccttcaccgagtatgtcttgctactcaggttgggccacgtgtctctcctgtatcattgctagaaagccacttaagatctgttctttttctagacgtgctcattgcttctagcacaaatcaaaatagatatggaaacacctacacaagcagcctctgcctcccaaattgatctgtttggaagatttaaatcaagagtggatgtcagggaggtatcctcctaacgcagaattttgtgtgaagtctaaataaccacctcagcagttgctgaggtcttggcttgaggctttcccagcgagcataccaggcaggcttgcccttgtatttaagcatgtcctcgtctgcctctgatcactctcagtaccacctacaaaataaagtggtcgagatggtgtgtgagtagccacgtttatgttggctgtgtttcatttaattgttgataggatcattagctcagctgggactcctggctttgctttggtcccttttttcttgggtgataggtgctggccctctttttttttttttttttttttttggagacggagtctggctctgtcacccaggctggagtgcagtggcgcaatctcagctcagtgcaacctccgcctcccaggttcaagcaattctcctgcctcagcctcccgagtagctgggattacaggtgtgcaccaccatgcttagctaatttttgtatttttagtagagatggggtttcttcatgttggccaggctgttcttgagctcctgacctcaagtgatctgcctgcttcagcttcccaaagtgctaggattacaggcgtgagccaccgtgcccagcctccttttttttttttttttttaagacaggttctcactctgttgcccaggctggagtgcagtggtgccatcatatctcactgcagcctcaacctcctgggctcaagtgatcctcccgtctcagcctcctaagtagctaggactacaggcgtgcaccaccacggccagctaatttatttattttttttgtagcgacagggtctcactatgttgcccagggttggtctcgatctcctggcctcaagcgatgtgcccaccttggcctcccacagtgctgggattacaggagtgagccactgtgcctggctcactgccccttctatctctgcagtctcttcatgcttgagcttactagcgcctctgagaaaaagaaagcctacttaagatttccttttataagatgaccattgtcattttttccacctcaacactatttcccatttaaggcataattctttgctgttgggggcttcccagtgcattgtggggtgtttagcaggatctgtagcgtgtacctaccagaccttcactcagttctgacagccagaaatgtctccagacattgccaggtgtctccctggggggcaaaagtgcccctgttgagaaccaccggtgtaagtggaccagctctcccaacctcctccagtccttgcctcgagagttttagcagggagtgtcagaatctactgctggaagcacttggtaggtcttctttgatggaagagatgatagagcgtccaatcaattagggatctgacactccgcagtcagttggaaagagaacagcgaagggtaatgtggcagtgcttttgtattaattccatgtgcaaggtgtgtgtcaattctgctgcttctcggccaggcgcagtggctcacgcctgtaatcccagcactttggggggccgagatgggtagattacaaggtcaggagttcaagaccagcctggccatcatggtgaaaccctgtctctactaaaagtacaaaaatcagccaggcgcagtggagcatgcctgtaatcccagctacttgggaggctgaggcatgagaattgcttgaacctgggaggcggaggttgcagtgagcagagattgtgccactgcactgtagcctgggtgacagagcaagactccgtctcaaaaaaaaaaaaaattctgctgcttctctgtgcaagaccctctctgccatcagcctgttgtctcctgaaagccaaggagcgagtctcagggttttttttttgccttttttgagaaggagtctcgctctgtcacccaggctggagttcagtggcgcaatctcggctccctgcaacctccacctcctgggttcaagagattctcctgcctcagcgtgctgagtagctgggattacaggcacgcttcatcatgcccggctaatttttttgtatttttagtggagatgggggtttcgccatgttggtcaggctggtctcgaactcctgaccccgtgattcgcccacctctgcctcccaaagtgctgggattacaggtgtgagccaccgcacccagctgaatctcagctttaaaggggaacttggaagcgtgtggccactgaactctgaagagccttccatttcctgtttgcaaatgaagccccaggatccagatgtactgcttgtgtcttagaccatgaaagccttagcaagactgatctccagaacagtcacgactgcgggagaaagccaagctcatttgcaatagcagcgtccaccagagcactttgcagagcctgaatgctgtggaaactctgggtctcgttcctgtcactcactcagaaagagccagagtgaaaagatgtgaactgtgcgtcctgcatgtggaaattgcctttcagcagagtccctgcccgtggagtaactcggctttcagggctagatcttgacaggcgccacactggttgtatttggagttggctcttcctttaagtagctgcgggtccccaaccgtggagggctggcagtcttgtctccccgtaggtggcttaggtgacaatgatgacggtgcagacccatcgacttggggaaaggcttgaaaagaactttcacttagtagctactcagcagggccttggtcatcgtgctgcagcctgggaacagtcatttccaggcttaggtgtagaagtttgttctcttcgggggcccctgggagcccactggcttccagttgatattgacacaggtgctgtcaggtttccagccctgtttcccagcagtctgggctgttgtttgtgtggcttcaggacagaaacatgagagatatcccaggtccaggccatgactcgcgtggcttcaggagtcctttgagctttcggctccctggagtcctttgagaggccatcgtctgaaagcctcacagggtttcccacacacagaggccctggtgatattctttctttctttcttttctttctttttttttttttttgtgacagagtttcagagtttcgctctttacccacgctggagtgcaatgacacaatctcgactcaccgcatcctctgcctccccagttcaagcgattctcctccctcagcctcctgagtaactgggattacaggcatgcaccagcgcgcccgactaattttgtatttttagtagagacggggtttctccatattggtcaggctggtcttgaactcccgacctcacgtgatctgcctgcctcggcctcccaaagtactgggattacaggcatgagccactgcacctggccatcttttttttttttttttttgagacagagtctcgctgtgttgcccaggctggagtgcaatggcacgatcttggctcgctgcatcctctgcctcccgggttcaagtgattctcctgcctcagcctcctgagtagctgggattacaggtgcctgccaccactatcagctaatttttgtatttttagtagagatgggatttcaccatgttggtcaggctggtttcgaaatcccctgacctcatgatctgcccacctcggcctcccaaagttctttttttttttttttttactttaattgaattattttttaattttgagacaccatttcactgtcacccaggctagagtacaatggcgtgatctcagctcactgcagcctccgcctctgaggttcaagtcattctcctgcctcagcctcccaagtagctgctattacaggcatgtgccaccacacccagctaatttttgtatttttagtagagacaggttttcaccatgttggccaggctggtctcgaacccctgacctcaagtgatcccccacctcagcctcccaaagtgttgagattacaggcgttagccactgtgcctggccttttttacatttttaaaacagagacagggtttcaccatgttgtccaggctggactcaagtgatcctcctgccttggcctcccaaagttttgggattacaggtgtgacccaccacgcctggccagtattctctgttgcttagtttttctagtttgactgttttgaagtatctttttccccccccaattttatcacaaagcctgccagctactgacaagtagggagtggcccataggtggtaaggaaggtgaataagagagtcccagcctcgggcagcctttggcgcagggtgtcttcagctttgggggccagactgttctttatggcgaggtgccgtcctgcacactgaagggtatttgagcagcctccctggcctccacccaccagatgcttctagatgtgataacctaaagtgtctcccgtgttgccgagtgtcccctgggtggcagagttgctcaggttgagaacacgagtctaaaggggaagacagacacaggccgtggtgtgtggccagtgacgacctggggaatttggaggaaggaacagcttcttactggagccttgccttggcctcctgagtcagcatcatttactgtctggtaattcaggccttggttgtaatgtcagctccacagagagccccctagtccctaccctgtgtcattcttacaccaccctgggttatgtatttcaaaacggctaggaaaagaagttcagaatgcattgtttcttattggttttccttccttggttgacggtgagtccttaagatgaggtgggccctgcactgtcttgttcatgactgtatccaccttctggaacgtcgccagggagcagtgcatggtgcaggaatgagaaactggatgctggtgggaacatggccgctctcagctagcgggtcctcttcagggcagaccctgcctcgtggaagatgacagctggcttggacagagacagagataaccccttaacgtgcagctcctaacttaagcagcccctcgacattcaaagggagccccctggctgttctctgggggaagtcccgctagttgtcaacaagtcgattcttgtgtttgtatcttcttggctcatggagcaggcggtgaccccttctccgagccaggccctggggtttattcagaggccctgctttcagggttcctgcacagtcaaggtggggggtccgatgagaaacagatgggcagatgcgggtggcgcatgggagagggcagagagaggatggagcaggccagggaagggtgggaggaggttgctgtgggcaggacctgtttcatgagggactgttcctggtggggagtgatggcctgaggtgagagtgagtgggtgtgcttgaggaacagccaaggagaacggcagggtcaggagctgaaggagagaagggggagagggagccaggagcgtgagaaccactggatggttctgggaggcggttctgctgctgtgctgagaatgaggggtcaggaggcccctgggagaccagggaggggccccaagtgatggaggcggggtagacagtgatggaaacagagtggatggtgacaaggaccagagagggtcccaagtgatgggaacagagaggatggtgacaaggaccagagacaattcccaagtgatgaggacagaatggatggtaacaaggagtagggaaggcctcccgagtgatggggacagaggtggacagcaatggcgacagagtggatggtgacaaggaccagagacagtccccaagtgatggggactgagtagacagtgatgaggacagagtggatggtaacaaggactggagagggatcccccgagtgatggggacggagtggacagtgataaggaccagagaagtgccctgagtgatggggacagagtgactggtgacaaggaccagagggggttcccatgtgatgggggcagagtggatgatgatgtagatcaggagcgggggtgtcagtgagagtgagaagtctgggctgatctcaggatgcctgattctctgggtaaaagtgtgggcccctgctgaggtgcataaggccagggcagttggggggctgctatgtgtctgtgcggtgcctgccatttgaggctctgttaatcagtacccaggcggggctgtgtgtggatgctcagatggacgtgtcggccacgcaggatggttgtcatggtgtgggaggcagttcgaactctgcctgatgaggccacccagggcacggggagagaggaggtgccggaagaaaaagaaaactgggcttgtgctgggtggtttagagcagcacagtcggcaaatggtagcttggagaccaaagccagcctggctcggtgtgattggttgtgatttttacattttcaaaggattaaatttttaaaaatgtttcatattgtgatactgttcacataacataaaatcatcatcattttaaagtgttagtatattcacaatactgtacaaccatcaccactaattccagaacattaacatcaccccaggatcaaaccctgaacctcctaattctcctctccccaagcccctggcaaccatgagtctgcttcctgtctttatggatttgcccgtatggacatttcatatcagtggggtcatacaccgtgtggctgttggtgtctggcttctcactcagcatcgtgttttccggggtcattcacatcggagccggtatcagtgcttccttccttaagactgaatcattctccactgtatggcaggaccacatttcgcatgcccactcttctgttgatggatgtttggcctgtttccaccttttggctgttgtgcatagtgctgcaacgaacattcatgtgtgaggatgtgttggaacacgtgttttctttttctttttttttcgagacagagtctcgctctgtcgcccaggctggagtgcagtggcggggtctcagctcactaaaacttctgcttctcaggttcaagcaattctcctgcttcagccttccaagtagccgggattacaagttcccaccaccacgcctggctaatttttttgcatttttagtagagatagggtttcaccatgttggccaggctagtcttgaactcctgacctcgtgatccgccatccttggcctcccaaagtgctgggattacaggttccagccaccgcgcctggcttttttttttttttttttttgagatggggttttgcttttgtttcccaggctggagtgcggtggtgcattgtcggctcaccacaaccccctgggttcaagcaattcttcctcctcagcctcccaagtagctgggtctataggtgcacaccaccacacctggctaatttttgtatttttagtggagacggggttttgcaatgttggccaggctcgtctcaaactcctgacttcaagggatctgtccacctcaacctcccaaagtgctagaattacaggtgtgagccactgcgcctggcctgagccactgtccctggcctgagcaccttttttcagttctcttggttatagacctgggagtgggattaccaggtcatatggtagcaataattccatggtcaacctgttgaggtaactgccacactgtccctcgtggtggctgtaccgtcccatctggctctttttgccaagccctggtctagagcgtggttccccattttgtcgcagtggcacactttaggggatcagagggtgcatgcggagcttggaaatgcctccttggaatggtggggggctcgcagtgagcctacagctgcctctgaaacagaccttggctccatgctgcttccctacatacccacaccctgctcgttccgaccccttctgccatcaaacctgtgcaccatggagaaacagacgcagccccctgtgagcctgagcagagaatcattccggacatccccagagaatcttacaacaaaccccgccactgactgggcgcagtggtttacgcctgtaatctcagcactttgggaggccaaggtgggcagatcacttgaggtcaagcgagaccagcctggccaatatggtgaaaccccatctctactaaaaatagaaaaattagccagcgtggtcgcacggcacctgtgatcccagctactcaggagaatcacttgaacccgggaggcaaaggttgcagtgagccgggatcataccactgcactccagcctgggagacagagcaagactccatctcaaaacaaaaagaacaaatcccgccaccaaggagaaattgttttagaatcgtggctgctctgcgtcttgtatttctgcttttctcagctgagactttctagaattgtctctgtacccattgttctgggcagaattgtgtcatccccccaccccacattccaccccaaattcatgtattttagccctagccccagcgcctcagaacgtgactgtatttggagatggagcctttgaagaggtgatttaactgaggccgttagggtaggccctaatccagtctgattggtgtccttataagagaggagattgggacacacatcagggacatgcgtgcacagagagaagaccacatgaggacacagacagtggccacccacaagccaaggagagagtccttagagaaaaccaaacctcctggcaccttgaccttggcctcctggcctccaggcctccagaactgagaactactaacttctgttgtttcagccagtctggggtacctcgttgtggcagcctgagctgatggatgcactcaccccactgacggtgcctgtgcccagcagaggtacctgtttcagtacaagacggtagtggtgtgcctggccttgcctgttgcagtagattttcagggtcagcgtttgggtcacctgcagtgttgggcactgcagggcagcggaaacagtgaagtctgtgtgtcccttcatccgttcacctgatcatccccaacagtgggtgaagctcactctgtttctcacactgttctgggcactggggatacagccctgatcaaaacccccaccctcgtggagttcgccatctagtcagggactggcagacagtgcaatgagtaaaatacatgatccataaggtggtgacgggccgcggagaaaaatgcaggagtgctaggaggtggcgtcattttactttggtgaaagagcgttctctaggactcaccaagcagggcttatccaagcaaaaacctcagccaggctggaggaatcctgactggctggagacccagcccttgtgtgctggggatggtgcagcataattctggtttagaaacaacagctcctcctctgggggagtggtcctgtcccaccacaacatgggagggaggcaagcttctttctatttttgctcatatcggctgaaaagtacacgcatagagggcattcttggtgggtgttcagggcctgtcttttctcccaagcgaccgatgcaccttattgcgattggcctgggtcttagcaccaaaaatgtcatgtcccttgaagtccccaacaacctggacagtgggtcgcctctaacctccagggtccccatcttatatatcctaccttggcatcactgctggcagcagttgcctttccacgtgaaagcaatcttgctgaaacagattgcaggaggcgtgggagacttctctattatatgcagcccagcacttggcaccacagaggcttaaacatccactttgtacatttctcctgaatgtgaagttttccaaatgcaaggtgctcgttgaacttgttgtgttccttgagtagattggtaaggatcgggtggaggtgagctgggaagactcacctgtgcaccccgccctgcttgcctccaggctctcagaagtaacctttccctgtctctaatacagcttggctccgtgctgagttttttctgttcctgtgcagacagtggctgggcctggtgtttttcacaatctgtttccagtgtcgggcctggcagtaactcattgtcgccttgtcaggagaattcgcacaaccacggggacggtgcagaggacttcaagcagcaggtgccgtataaagaggacaaaccccaggtgcccctggagtccgattccgtggaattcaacaacgccatcagctatgtgaataagattaaaacccgcttcctagaccacccagaaatctacaggtcattcctggagatcctgcacacgtaccaggtaagaactcagattacaattccttgtgggttttggatttcatccagtttggggccctgcagatattcagattttcttgtcggaattcataaaatcctgtaaaattctaattagttgtggggttttttgtttgttttttcttagagtctggctctgttacccaggctggagtgcagtggcacggactcggctcattgcaacctccacctcctgggctcaagccatcctccaacttcagcctcccaagtagcggaggctacttggggctagaacatgggcgcacatcaccacacctagctaatttttgtaatttttgtagagacagggttttgccatgttgctcaggctggtcttgaactcctgaactcaaacgacccatccacctcagcctcccaaagtgctgggattacaggtgtgagccaccgtgcccagccacctttttttttttttttttttgagacagggtcttgctctgtcacctaggctggagtgcagtggtgtaataatagctcactgcagccttgacctcctgggctcaagcgatcctcctgcctcagccctccaagtagctgggagtacaggtgtgtgtcaccacacctggccaagacagtctttttatcagatgactttgttattgcttaggcaatacggccatcctttactttgctgattacaactgggcccagcaccaggagctggggctacagagacaaatggctgctcctgcttagctgttcattgcagtggtgggaagaaactcagaggtggattggggtggaaaagaaaggatgtgggcaggagaggtgagtcagggttaatatgattcccagcccggttcccaacccgtccggggccagggaggggacagtcaggttgaatcttgacatatcagtcggaaccagtaggcaggttagcctggaggaagggtggacattcttggtgccaggaatggcctgtgcaaaggtccagagaccagagcagacagcggcatcagggcgtctgcaggggacttgggcaatgcaggtgggctggtggcgagggacatctgtgtcgtgagtggggcttagacgtcctcttcacccagacgtggagtctctaacgcttggaattttttttagcagcagaacccattttttttcttttttttgaaacagaatcttgcgctgtcacccaggctggagtgcagtggctcaatctcagctcactgcaacctcagcctcccggcttcaaacaattctcctgcctcagcctcctgagcagctgggactacaggcatgggccaccacgcccagctaattagcagaacccattttttaaaatgaaatccctgcagccttgacatgtcgagtcaagaagcgggattcttttcagcataagcgtttcagatcaaatggatagaatttgtgttctgggaactccacagcatttgttgtccaccgtgctggcatcatcatgggccttagcatctgtgagaggctggtacagccctaagaacgcttgtttgtcatggatgagtggttgccagtggctgctgtgagcatctggtctgtgtggagggatgtgcttgtgatcgtagaatctgtgggcccctcccaggctttgtggggtcatcacatttaggaaggcgcatcagagcagtctgtgcagtggctctgttctgtggcaaaggaaggggcaggttaaagacactagagatgaatttagacaaggtcacaatgaggggttgccacagactccttcagagagagtgccatgggaagggacaacgcagtatcccccaacccaaaccgggctgctgagagttggttgagaatgcagacacctggccaccatgcaggattcccattcatcagggcccgcccggcatcggcacagtttctttttttgtttttatttttttgagactgggtctcactgttgcccaggctggagtgcagcggcatcatcacagctcactgcagcctctacttctctgggctcaagcaatcctcccacctcagcctcctgagtgactgggactacaggcgctcactccgacgcccagctaagggctaagaggagacggggtttcaccatgttgcccaggtgggtcttggaactcctggcctcaagtgatccacccacctcagccccccaaagtactgggattacaggcgtgggccaccatacccagctggatggcatctgcattttaaacaaggcccctggtgactccagcctcaggttgtctagttttttcaaatgtaagtttgaactgttgtgtaaattatcctggttttagaatgttggttcagatatttcagggatactgttagagccaaaccaggcagctccagggtccatctggccgtgtgttactgtttctccatctttgtggggctttccttcagactttctctctgccaccttctccctcggggttcttatccgtaaaatggccacaaaactggtggtgccaatgagcctgggttcagtgaggttaactgagcaaccagttcaggcacaagcctgcctcaggtcacccctgggtaactgtcacccattacacagccacgtatgcatgtcctgtgtgtgctgggatgaacagttagtcctgccctaacataagtgggaccctaaaaacgagctccctctgcagagttgcaaagtgtgatgggaactgcaggttcatgggaaacagactcagggtatgacattcaaaaacttcctcagggacacctagaaaaagataggcaccgactctaaacagcagcgccgttacgcgcatattaagtggccgagaattacatgaatgccacagcaaatcgggtactgaccttggaagagacctgaggctggtttgtggatctggtggcagcctgtgaattatgtgaaggccgggaggaggtcatctgaaatcagacaggtcattgtggcctcagatggggacagggctggcccctagcacaggggaacgctgagagagtgcatggacatgggagggggtgctggcgtggttttgcatactcccacggggttctggtcagccgggagcagtttctgcattcacctggtgtttctcctgcacaaaatagaagagaagcaaacagaaaattcacctcatgctcaaattattcccagtacttgtatctcatttagacagacatcttgttcaaaataagcattctagcagaactgactgtctctgcagcatgaatttccagaaactacttccctaagttgagggcgtactatgcattcatagagatcactcaatttccttctaaaaggtggtaccaatttgtctttctgccttccgtgtttgattgtttgtttgtttgttttttgagacggagtctctttcacccaggctggagtgcagtggcgcaatctcgtctcactgcagcctccgcctcctgggctcaagcaattctcctgcttcaacctcccgagtagctgggactacaggcacgcgcccccacacccgggtaatttttgtatttttagtagagatagggtttcaccatcttggctaggctggtcttgaactcctgacctcaggtgatccgcctaccttggcctcccaaagtgctgggattacaggcctgagctaccgcacctggccttgccttctgtgtttgagagcacctgctccccacaccctcatcggaaatcctagcctcttctgtctgtgtagtcagatgagcagagatggctgtggcactgttttaaattgtttctttaaacatcagtcaatttggtcattgtttcttttcttctttatttattttagataggatcttgctctgttgcctaggctggagtatgcactatcatgatggtagctcactgcagccttgagctcctgggctcaagcaatcctcttgcctcagccttccaagtaactaggaccacaggagtgtgtcaccatgcctacataatgtttaaaacaaatttttttaatcatttctcagcattttggctaagatcaagtgtaaaattttttgtagcgatagggtctcactgtattgcccaggctggtcttgaactcttggactgaagccagtctcctgcctcggcctcccaaagtgctgggattacaggcatgagccatcatgcccagcctaaattgtttctttaaacttcactcagtgtggtcgttgttctgtccgtatgcagatagatcatttctatttattatctgaactgagtggcctttgcttgtttttaagttttgctttttagtgtcttttgatgactttttggaagggtggtgttttttttcccctgcagtgtaggtgctgccggtgccaagatttaaaacttgcttcccttcccacaggctgcagcgggtgcagaggggcaggaggcgccagcacagggattcctcctgctttgcagccgtgcagtgggactctggaagccacgccatattatccgggaggctccggtgctattgcctcttgttctgtgacactcttgggtgtaaaattgatacggacgtatttctaacagccacggcggttttgctggcccgttcctgccttccaacctgggttccctttggtcctcttgttgctttaaggtctggatcaggccattttccttgggtctcagtgactccgggccagtaggtgcctcggcctggaagtcccttcccttcatggcccagcgctccccagttctacactccccatttcccttgggaaggcctggggttcgcccctgaccttgtacttccccggcccacccctgattacagccagcctgtcacctccctgccccctctgttcgtggacactgctgggtccccaccatactcctggacgggacctgcccatggccggggctcaggccatgctgggcagcaagatccacaagtgtgcagacaggaccctgcgggcaggtgctctttcctgagagtcatcctgtccccttcacggagggctgcctgagtgtcccggcccagggcacagcactccttgactaacgacttattttccctttcctgaaaactggcagaaggagcagctgaacacgaggggccggccattccgaggcatgtctgaagaggaggtgttcaccgaggtggccaacctcttccggggccaggaggacctgctctcagagtttggacagttcctgcccgaagccaagcggtctctggtgagtgccgagagcccctgcccagcctcgggggcctcagcgaggacggagggccccagccagcttgacccatgtccgggccaagcctatgtaccctccaggccacactagggtcccccagaagctacgcaggttgcagatacccaggggttcctcactgtaggctccacctgcacagcaagctcgtaaacgatttgccaaggtgcttctctgtacagacagtacctggatcttggggtggtttgggaggcagagagcatcttccagtggagactatgggcccaggggttccacctcctgtgtctgccctgcagagccccaccctgcctgggaccccagccctgtgggaaggtgcaggagggctgggtccacaatcatcgcttcccctgttggatgagactgatctggggctccagcaggttggatctggaggagccagtagcgggggtggcctgtggcctggccctgaccatggtggtagagagcagagatgggcgaggaggggccttagacagggctcagggctcaccctgcacagtcagcctttctcccctgcctgtggcctgaagctgccagggccgcctgttccgattcctcttttttcccccactatgatcataagacttttttaaaaattgaagtgaaatttatgtaacatcgaattcaccattgaaagtgaacaattccatggcatgtggtacatcctcagtgttgtacaaccttcaccactacctagttccagaacattttcatccccctgaaaggagacccagtccccatcagcagccaccccattcacctcccccagctcctggcaacgcccatgtgcttcctgtttctgtggatttgattcgcccattctggacatttcagatgggtggaatgtcaccatatgtggcctttgtgtctggctcctctcactcagcatcatgttttcaaggtttatccatgtcgtaccgtggatcagtgctcattccttttcctggctgaatcatattctgttagatggatgagccacattctgtttatccgtattctgttgatggacatttgggttgtttctgccttttggctgttgtgaacagtgccgccatcaacatttattgcacggatttgtttgaacacctgttttcagttcttttgggtagacacctaggagtggaattcctgggtcacatgttaattctgtttttgactttttgaagagcctctaaactgttttctacagtgaccgcaccattttacattcctatcagcaatggactgcggtttctgtctctccacatgttggccaacatttgttcttttccaggtttttttttttttttttttgccttttgtttttagtagccatcagtgtgtgaagttttattgcattaaggtttgtttgtttttattttttgagacaggctctctgtctgtcacctaggctggagtgcagtggcgtaattgatcactgttcactgcaacctccatctcccaggctcaggtgatcctcccacctcagcctcctgagtagctgggactacagacaccaccacgatgccaggccaatttttgtattttttgtagagacagggcttcgccatgttgcccaggctggtctcgagctcctggcctcaagcgatccacctgcctcagtctcccaaagtgctgggattacaggtgtgagccactgcgcccggcctacttttattttttaattgtagagacagggtctcacaatgttgtccaggttggtctcagactcctggcctcaagcgatcctcccaccttggcctcccaaagtgttaggattacaagcatatgccattgtgcccagtccatggtttctttaagtggcatttatgcagggcacccggctagctcagtcagtagagcatgagactctcaaataacatttattaccaatttagctaagatttttagtgtgtattggtttattagagctatcttgtatatttagaaagattggatcaactttttaaaattattaaaagcactgcatctgttgtgtgaagtataatctttatgttaacttttggacatatattaaaactgtaggaaaaagaaaccaagatgaaatttggcattgctctaattaaatttgactggcctggatcagaggttggcaaaccttctctacaaagggccagatagtaagtatcacaggctttgcaggccagttgatctttgtgtaaagattcacctctgccctagtagcttgaaagcagtcatggaatatgtatgtcaatgactggacagggctgtgtgccaataacactttatttacaaaatgaatgggtgtggccgggtaccaacaaaactttatttacaaaatgaatgggcatgactgggtaccaataactttacaaaaggaatgggtgtggctaggtgctgataaaaaattttatttatgagaacaacaggccctgtgttaatttgccattccctagcctaggtggtctttgggggtccatctagctcagatgttcacataattgggagattaactgaaaagcaagaaccatgtgaactgttggggaagatctgctatacctgcttggtgagcttggctggacgcatggcgggtttcccctccaggtcccctgttcttgttcagcatttgtcatatggtcgcccagctgcatcttttgggaatcagtttacacctgttccagcatatacaaaaaatagccaagcgtggtggctcgtgcctgtaatcccagctacatagaaggctgaagcaagagaatcacttgaacccaggagacggaggttgcactgagctgagatcgcaccattgcgctccagcctgggtgacagagtgagacctccgtctcaaaaaaaaaaaaaaaaagatgtaccagtggagaattgtgtagatgccaatttctccacttacagctctcgaaatagccttgaattttgggtaattattccccccaaataattccccccaaaactcaaatagccttgagttttggtaattattccccccaaattattcttctaagtcttaactgtggctaaataataagtcttttttagtagtagtagtagtattgtggctaaataatgtctttattattattatggtaaaaatagtatacactaatgaaaaaataagtattagcaagagtatcaaatttttaatgcaaacttcctctcccttgactcagttcttagtcattcttctcagaggttagcacttctaagtgtcttgtatatctttccagaaatttcctctgcatgtgtaacaaatactttttacaaagcgacacacggcatcctatttgttctgccccttgggtttttggggtttttccttgtttttttttgtttgtttgttttatttcaggtatgcctgtccctaacagcagcccagagccagcccatagtatctgatcgctgcgggctgatttgttcagatgcaccatgacttgtccatctcacccacactttaggtctttgggggtgtctttgcatccaggtcctgtggtggcaggggaaggcggagtacgatggaggtgaccgcagtggcacagaacgttgtagggcctctccagctctgcccacgtcctgcagaaaagctgcggtctgtccatcgtcccctgcctgtccagccttccagtatgttcatagtagactgttgcagaacagttctttgtaaatgtcattggcaccctgtaggcaccctgctcgggacaagcatcctcgacctgttagccgatggctggagcctgggaggcaggccccgaaccagccacgagccccactctgctcccagcaagtgacgacatcatcccccagaaacgttttgtcattcatagaaaagacttcaaaacctggccccaaggcccccaccagtgccctggcaaacatcagccacttccccttgctgcctgtttctctgtccactgcaccttgtgtttctgtggtgccggcatgcacacggcgagatgccccaccagtggccgccacatgagcccccgcacgggaagacccaactcagctgtctccctcctgaaacccccagcccttctccctcccttatccataaaggcctcacaggagctttctcccagcctggcagtgttagtctgtgatgattcggttaccttggaatgtgagcatcttgctggagtcacctcacgcatggacggagcatctggcctggtgcccgtggccaccattgcccaccgggctgtgggctgagctggaagcagctctgcatgctcaggtgcatgggtccagccacgtctccggtgctgaccacctcccacatgtgtccttagttcacaggaaacgggccgtgcgagatgcacagcgtgcagaagaacgagcacgacaagaccccggagcacagcaggaagcgctcccggccctcgctcctccgccccgtgtctgcacccgccaaggtacctgtgagccacatgcagccatgcctgcacgcggggcccccagcaaatcgggccttcccagcatgtgaccagggaacagaggccccagcaggggttcggggctggaccgggggctgtgtgaggttcaccggcagtgggaccgttggaagtcagctctcctctaaggtggctgttcttccgttctccctgtcctgtgagattgttttgaaaaggaggaggaggaaggagtgttaaccctgccctaggtcccaagaaacagggtgtaccacccagtctccttttcaccctcaggactctctcacaggcaaggccgccatgtacgtttgttcaggttggtcactgcacagctgagggcagagaggggctgggatccagctcctgtcacgcctttcacctgcaatggtggttttccgattccattattccttgtgcagttactacttggctttctactattggtgggaactttgtcgtcctcccatttatttagttatgtatattagatatggactctgggttataatccattctagtgttgatgtccatactgttccagattgggccagcggggtccctttggctcttgtgtcctttttttctttcctttgagacagagtctcgctctgtcacccaggctggagtgcagtggcgcgatctcggctcactgcaagctccgcctcccgggttcacgccattgtcctgcctcagccttcctgtgtccttttggcatgtcctcatcattctttctcctgtggggggatggggtttcactctgccacctaggctggagtgcagtggcacagtcagccttgacctctgggctctagctgtcctctcacctcagccttccaagtagctgggaccacaggtgtgcaccaccacacctttttgtagagatgaggtttcatcgtgttgcccaggctggtctcgaactcctgggctcaaacaatcctcccgcctcagcctcccaaagtgttgggattacaggcgtgagtccctgcacccagctcatcctcattcttcaggcactttggagatagttctggatggacagtgttgtccttcttgccatgatcgtgcatccaagttcaggtccaagtccagcttagagacaaaagcctgcagagactcaacatttggcttctccagggtcttcccagtgccaccctcttcctgtccgcttcttgttgctgtcttggctctcaggacaaaacagggaaaggattctgagattgtcgtagccaggggcacatcccccttgcctttctgatgctgtggcactcttgcctgttacccaaagccctaccctgctgagatggagatcccagatttggcagtggcaggtatccccagaggtgtcatctcaggggtcctgggtaactgagcggctcctgcctgtccctcactgagcatctcatggcagttcccaaaggagagcacggtcttagccttcttgagactctgtgacagcgatggacagaggccaccggtgggaggcacagtgttaactgcatagaatttctccccacagaaaaaaatgaaacttcgtggtaccaaagacctgtccatcgctgcagtggggaagtacgggactctgcaggaattttctttctttgacaaggtgagggtgggccctggcttccatcttggggatgccatgtccagctggctgggccaatgctccctgggcctgccccaggattggggcggggagcaggtagggtgggtgcagtctgaggatggatccggcggggctggcccccagctttcactgcggaagggaatgtgggcctccttggagcccaggcatatactgtgggcaggagtcccagtgggtgctgagactccaagcagagtatgaagacatacatgtctgccaccctgcagctgtgtggctttttcttatatcagggatgattgtagggttcccgcccagggtctgtgggcagagcagacaaggtggccgtgtgcatgggctgtgaattgctgcatggattgcatgcacagactgtgaattgctgcatggatcacgtgcacgggctgtgtgaattgctgcatggacacatgcatggactgtgtgaattgctgcacagatggcatgcatgggctgtgaattgctgcatggattgcgtgcatgggctgtgtgaattgctgcacggatcgcgtgcacgggctgcgtgaattgcacggatcacatgcacgaactgaattgctgcatggacgcgtgcaggggctgtgtgaattgcacggatcgcatgcacaaactgtgaattgctgcatggacgcgtgcagggactgtgtgaattgctgcacagatggcgtgcatgggctgtgaattgctgcatggatcacgtgcctgtgctgtgtgaattgctacacagattatgtgcacgggctgtgaattgctgcatggatcacctgcacaggccgtgaattggtgcatggattgcgtgcatgggctgtgtgaattgcagcacagatatcatttacttatagacacagttggttcccatatcgcacacccatgtggctgacctacaagtgagccaggcccagaggctgaggagcaggggttcacagtggtccctgactgctctctctgcaggtccgccgggtgctgaagagccaggaggtgtatgaaaacttcctccgctgcatcgcactcttcaaccaggagctggtgtctggctctgagctcctgcagctcgtcagcccatttctggggtgagcagctgacttcccagggctccctaggggggttctgttcctgtcaactccatctacttggtttttagttactgtttttgagcaatgattgtgcttttctaaaatcctgtttattaattgacgtgattgatataattattgattcccatgcatttgtaaggagcaatacaccacctgggtaccctccagctggttcctttaccagtaacatctgtagtcagtatcctcaccagaatacagtgggtcctcgagtaatgccttttcatttaacactgttttaacaccgatgagaaaagaagacattcatttctggtctgagtggagtttgcacgttctccccatgtctgcgtggattttctcccacatcccaaagatgtgcatgttaggttaagtctaggttaagcggtgagtctccgtggtcccagcctgagtgagtgtggcggggtgagcgccctgcagtggggtggcgtcctgtccagggtgggtgccccactggtgctctgagctgctgggatagggtccggccacccaagatcctgaactggaataattgggtaaattgttattttacttgtttttactcatctttcttatctgtatgtgtggcttgcatttatttcagtgtttaatattagaagtgttttggtctctctttagaaatttggtgattgttttgtgaccaaaaatacgccgtaggaacgtcattcttgtttatgtgtcaattagcttgtggcaaaattggttttgttacacatcttttcaacttaaagacacagctttctaacacctgttgatgatgttgagtgaggacttactgtactgactctcacacaacccccgttctttccagactctccgtgttcctcatacacgtctggtgtgtgtgtttttatacagctttctcactgtggagggttgtgcgtccgccacagtgaagatactgaacggctccaggactgtcaagttctggccttgaccttttatctccatcccaaaaccctgcctcagccggagtctgttccaaacccctggcaactacttatctgttctctagacaatgttacagtaatggaactgtacaggaggaaccctctgggagaaaccttcccccccccccccccagcaaaattccctggagattcacctgataaatacttttaaaaattctaacacttgggccgggtgcggtggctcgtgtgtaatcccagcactttgggaggccgaggtgagcagattgcctgaggtcaggagttggagacaagcctggccaacatggtggaactccatctctactaaaaatacaaaaattagccgggcgtggtggcaggcgcctgtaatcccagctacttgggaggctgaggcaggagaatcgcttgaacccaggaggcggaggttgcagtgagctgagatcacgccattgtactccagcctgggtggcgacaagagcaagactttgtctcaaaaacaaaacaaaacaaaaaaataattctaacccttgggtcgggcttgggttaggtgcggtggctcacacctgtaatcccaacactttgggaggccgaggtgggtggatcacttgatgtcaggaattagagaccagtctgggcaacatggccaaaccctgtctctaccaaaaaatataaaaattcgccgggggtggtggcacacgcctgttgtcccagctacttaggaggctgagctagaaggatagcttgagccagggaggtcaaggctgcagtgagctgtgatcacgccactgtcctctagcctgggtgacagagtgagaccctgtatccaaaaaatatatgtatatatattatacctctgctgcacaaagagaagcctcattagcaggtcaggtctaagagtagcttctaacctctggtggccaggtcagcctcaggaaggggctgggactgagtggaggggcctggaaacaactgcgcacactcgtatccattctcgggctcacaggagtgtgcgcggtaggagtaggcgggcctgtgagtgctgagacctgggagccagctggggccagtgttgcttcctgcacatcagccctgtgactagggtgagtcacttgggcagtctgagcctctgtttccttgctgtaaaatggggatagtaaatgtaccgacctatgtggggttcctgagagctgcaggtgggcgctacctgcagggcccttcaaatacaatagaatctcacaaataaaaggaaaagacgattttttcggcagaaggaaatgatgtaagtcacaaacttggatctttcctaaagaatcgaagagcatggagaaaaatacacgtgaagatttttttttttttcaagacagagtcttgctctgttgcccaggctggagtgcagtggcgcgatcttggctcactgcaacctccacctcccaggttcaagtgactctcctgcctcatcctcctgagtagctgggattacagatgtgtgccaccatacttggctaatttttgtatttttagtagagatggggttttgccatgttggccaggctggtctcgaactcctgacctcaagcagtctgcctgcctcagtctcccaacgtgctgagattatgggcgtgagccaccatgcctggccatgattcttttttttaatggttcttgcacatggtgggtgcacatattaacatgatcagtccattcagtccttagcccttttcccatttaccccagggatagtagttgacagcacttgtggctgtagcgttcaccccaagataactttgccatgaagcatctcatttttattattatttttgcattgctgtcatatatcaactttggaaataaaagacatcattttatgtatagcatcctgtttttagtagtgatatttccagttacaaaatatagtaattcttgatcactgaaaatgtcaaatcttggaaaatgtagcattcctacacttgatgttaacattgttctcaaacagttgttggccaaagattcatttgatgaatctgactgttccaaaatagacgattctggtgattcagacgattctgatgttctgtttagaaataactccaagaacagtttttatattttactttcacattgaaaatcagtcagatttgcttcagcctcaaagagtgtgtttatgtaaaattaaatgagcgctggcagcaagctggacttttttttttgttctaaatgggaaaaagttgaatcaaccctggggacaggtgctgtgtgagcccttttgcattaacttaaaaaaaatatgtgtgtgtgtgtgtgtgtgtgtgtgtgtgtgtgtgtatatatacacataaacatttttctaatgtaaaataaagcacagatccaagaaaccacatggccaacaaatggcttgaatctttattaagcagtcacccatgtgcccaccacccacatcaaaaatagactccaggagcacccccgcataccattccagtccctgcccctcactgtgagagtgtcctgacttcaggagtgaccgccacctgcactaatgacggcacagccacccaggtgggcatcgccaaatacatgactcagtctcacccccatctgggttgggtttgctttgctttgcttcttttctcttctcttttcttttcttttcttttctttttttgagacggagtctaactctgtcacccaggctggagtgcaatggtgcgatctcagctcactgcaacctctgtctcccaggttcaagtgattatcctgcctcagcctctcgagtagctgggactacaggtgcctgtgaccacacccagctactttttgtattttgagtagagacagagtttcgccatgttggtcaggctggtctcaaactcctggcctcaagtgatccgcctgcctcagcctctcaaaatgctgggattgcaagtgtgagccacggcgcccaggccctgggttttgttttctaatacatctcgtaagtctcctttcacctctgattccctccgattctagtccttactatttttgtcctgatgcccctctgcctatccctgtccctgttatttctgtgatattagcctcccaggtttgctcattcatttggggttacacaggaggatcaccacagcatttctcaccttttataagaagtggcccaggatagctgcttgattacagccttgattcctccctagtcacggcctcagagtgatgaactgctttcatatcatcttcccaaggggaccaattaggttgtttcctttgtttttttttagcatcttaatgaattcatggacttaaaatatatttgatgcgtttcaataccgtttctagtccttttaaaggtgaggggccaggcgtggtggctcatgcctataatcccagtactttgggaggccgagggggaaggatcacttgcatccaggagtttaagaccaaggccgggcctggtggctcacgcctgtaatcctagcactatgggaggctgaggcgggtggatcacctgaggtcaggagttcaagaccagcgtaaccaatatggtgaaaccccttctctactaaaaataaaaaaattagccagacatggtgacctgtgcctgtagtcccagctacttgggaggctgagacaggagaattgattgaacccaggaagcagaggttgcaatgagcaaagattgtaccactgcactctagcctgggcaacagagcaagctgtctcaaaaaaacgaaaacaaaaaaaaatgaccagcctgggcaacatagtgagacctcgtcagaaactagccagaagtggtggcgtgtacctgtacctactttggaggttgaggtggctggatcgcttgagttttcgaggcagaggttgcagtgagccctgatctcaccactgcactcagcctgggtaacagagtgagaacctgtctcaaaaaaaaataaggaagctgaggctcaggtcgaacccctctaacttactctaggacaagcactcataggtgagcttagcgtgctgttaggcggcagccagggtgctccagccccaaagccagccctttgcatgttctctgccttctgggcacagtggctgctgggcttcggtgtgtatttttttttttaactcagcatttcttggaagtgtttcagcatcagatgtgaacccatgtcctcatttttaagcaactgcaccgcttttccttcccttaccagggtctctaacaatggacatttgtctctagtcctccctgtaagtggtgttgacagcaaatgctcctgagtctgcgaccctcatgggtcaagctgagcccatcagaaggcctttccctggtggtctcaggcatgcacgtgttggggtgatcttttcagtgggttttctttcttgggctgctgaaggtctgtaaacgccctgaagaacagcccagagcaggatggtgttactctagtctcagccaaaacggggactcctggggtctgtttgtgacgtgggtggtgggcacacggctgggctttttctgtggatgtggaatgcacattcaccttgagttgcctccactgggcttagaatccagcactctctgagcctgggtcccacctgggaaaaggggcccccaggggctgtgtgtggagctggtgttggcacctgggtccagcgggcacgtgaccaccccgggttggaattgggactctgcttcctactagccaagcgagcctcagtgtctttgtaaaatggccatacctccctcctgggtttatcaggaggttagaggggaagacagaaggaacatgaaaggtgagaatctgaaaggcaaggtgctgaacagatgggcagtgccggagcacagtcagctgttcttgtttccatgtttcagcagtagagactcgtatggggaagggcgtttggggaagggtctgtatggagcaaggtccagaattgaagcgggcctctgcgtgtgcttgacacgaggcctggttgggttaggagcgttcaccaccatgtggcgttcctccgcgtgttcaacctgcggtcaagtgctcagctgggctgggcagctgaacacggcccagggaactgcccctcgcagctggcagccgcgtggcagccagggtggatcgggttgagcattcccttcagagcagtcacgatttgcgtttatcccagcagtagcctcaggcatctctgcagcttttttgttggtctctttccttcctacgtttccatcggcttgtgggttttccttgtgagcagggttggcatagggttcttaaatacggggaacgacggagcccacatcaatgagggggacgtcgttatgcgagggtgggctgggtggctaggtcacagcaggattgtggcaccagcagtcaaagtaactgcaacttttttttttttttttttttttgagacggagtctcgctctgtcgcccaggctggagtgcagtggcgtgatctcggctcactgcaacctctgcctcctgggttcacgccattctcctgcctcagcctctcccagtagctgggactacaggcgcccgccaccacgcccagctaattttttttttgtatttttagtagagacggggtttcaccgtggtctcgatctcctgacctcgtgatccgcccgcctcggcctcccaaagttctgggattacaagcatgagccactgcgcctggccataactgcaacttttttggtaggatctgatgttactgcttagagacggggtcctgctctgttgcccaggctggtctcaaactcttgagctgaagtgatcttcccgccttggcctcctgagtagctgggattccaggtacacaccaccaggtctgatactattttaaacagaaatccaggtggcattgtagggtcatttgcattaaagccttcctgttgtcgaccacagccatgacattatgactttcaagcttgtgtccagagaggggttcacagagagaagtctccctcatgagaggaagactgtggatcagagataggcaaacttgatctctgaggggccagatgggctttgtggaaatgactcaaacccctcttgtgcaggcagccacaggcagtgcgtacacaagtggatgtgactgcaggccagtgaaactttatttacaatgggatggctaggcatggtggctcacgcctgtcaccccagtactttgggaggttgaggtgaaaggatcacttgaggccaggagttcaagaccagcttgggcaacatagcaagaccccatctctacaaaaaaatttttaaattggccctgcatggtggctcacacttgtaatcccagcactttgggaggccgaggcgggtgaatcaccggaggtcaggagtttgagaccagcctggccaacatggggaaaccccgtctctactaaacatacaaaaattagccgggcatggtggtgcatgcctgtagtcccagctactcagaaagctgagacaggagaattgcttgaacccgggaggtggaggttgaagtgagccgagattgtgccattgcaccccagcctgggcgacaagagtgaaactctgtctcaaaaaaaaaaaaaaaaaaaaatttagccgggtgtggtggcacatgcctgtggtcccagctactgaggaggctgcggtgggaggatctcttgagcccacgagtttgaggttgcagtaagctgagatcatgccactgcccttgagcctgggcaacagagtaagacactatctctaaaaagaaaataccaaaccaaacaaaacacaggcagtgtgcagactggctgtggcttgccactccctggcctgaagcctggcctcttccagtcagggaacatcaggggttccagcttctgccagtttaagtcatcttttctggtgtatttcaaagccttactgtgagtatgggattaataggcacaggaagggacctggtgtgtgacagatgggtgggaggcccattcattcacacaccccgggacttgcagtgacttcctgtgtattggattcttccgcctctcattcgcatccatgatgttgaattctgactctgtttaacttgtaatgtccacatgaagccattctaaaatctccagatccctctcagaaggccctggggatgaccagttaccatgtgtctttatctttgaaggaaatttccagaactctttgcacagttcaagtccttcctgggggtaaaagagctgtccttcgcgccacccatgagcgacagatccggggacgggataagccgggaaattgattatgcatcctgcaagcgcataggatccagctaccgggcactccccaaaacctaccagcagcccaagtgcagtgggaggacagccatctgcaaggaggtagcgctccctggggctcaaatgttcgttgacatggtgcatcccccacccctccccagcaaacacccgatacccccgttatgaatgaaatgctgtgtgctcagccctcctgaatgttgggttatgggtggtgctgggatgtggcccggcaaaaccacctgagcagagacaacagtgttgtaccctgctggtagttttggcaaaacacagagtgccagggataacgtggagttcggcttattcatctgttatttgacttaggtttattgctgccatgattctgctctgtcccgggctcactgacctcagtgtgtttctgtttagcttgaccattggacacttctccagggttcgtggacagacgattactgcatgtccaagttcaagaatacctgctggattccaggatatagtgcaggggtcagcaaactctggcccacgggccctggcccgctgcccgtgtttgtaaataaagttttactgtcacacagacacaaccattcctttacatattgcctgtggctgcttttctcaccacaaaggcagagttgagtattcatctgggatggcctgcaaaatctgagatggttgctgtctgaccctttgcagagagaatttaccaatgtctgaaatgaaatcggccctccggatctgcaagttcctcatctgtggtttcaactaaccatggattgaaaatacgtggggaaagagaaaccaaaaaatgacaatacagcaataaagcgtaatccacattttaagaatgcagtgtaacaatgatctacacagcatttacattgcattaggtataagtattctagagatgattttgcataggatatatgcaaataggattccattggacatcagggacttgagtatctgtggatttgggtcttcaggggtggttctggaaccaatctcccaggataccaagggagtgtccacttgaccaaagtcatgtttttccttaaaaactttatgcaccttcccatttgtataaggcagttggtattatgtatcaggatggtattatgtatcttggtactttctacactggctaacagtaaatcttggctcctggggcatgcagcgtcattcacggcatttcctcttggtgcaggtactgaacgacacctgggtctccttcccttcctggtctgaggactccacgttcgtcagctccaagaagacaccgtacgaggagcagcttcaccgctgtgaggacgagcgcttcgaggtgtgtgtgctgctgtggccgggtcccccggcatgtgcctgttccccttctccatgggacatgcatcctgatcctcctccactgccccagtctcgtttggaggagcaggaattgcagcacattccaacagctcctggaagcttcctgccgggtcttgctggcctttgggctggctaccagatggcacttttctttctgtttaaaaattttgtttgggctgggcgtagtggcagacacctgtaatcccaacactttgggaggccaagacaggtggatcatttaagctcaggagtttgagaccagcctgggcaacatggcgaaaccccatctctaccaaaaatacaaaaattagccgggcgtggtggcgggcgcctgtaatcccagctactcgagaggcagaagcagtagaattgcttgagccagagaggccgaggctgcagtgagccgagatcacaccactgcactccaccctggacaacagaatgagaccctgtctcctaaaaagtttctttaatgtaaaaattaaatttatttttattttatttatttatttattttgcttgctctgtttcccaggctggaagtgcagtggcgtaatcatggatcgctgcagccttgacctcccaggctcaaatgatcctcccacctcagcctcctgagtaactggaaccacaagtccatactaccatgcccaagttgttttttttactttttttgtagacatgaagtctcactgtgttcccgaggctggtctcacactcctggcctcaagcgatcctcccaccttggccttccaaagtgctgagattaaaggaatgagccaccacacctggctaatttttttttcctttttttagagacagggtctgtattgcccaggctacattaatttttgtaattaaaagttttattggctgggcacgatggctcacgcctgtaatccctgcactttgggaggctgaggtgggaggactgcttgaggccaggagttcaagaccaacctgggcaacaaagcaagagcccatctatacaaaaaaaaaatttttttttttttttgagacagagtttcactctgtcgcccaggctggagtccagtggcatgatcttggctcactgcaacctccacctcctgggttcaagcgattctcctgccttagcctcctgaatagctgggattacaggcacaccaccattcctggctaatttttttatttttagtagagacggggtttcactatgttggtcgggctggtctcgaactcgtgaccttgtgatccgcccatctcagcctcccaaagtgccaggattacaggcgtgagccaccgtgcccggccataaatttttttaattagccaggcatggtggtgcacacctatattcctagctacgtgggaggctaaggtgggaggattgtttgagcccaggaggttgaggctgcagtgagctttgattgtgccacagcactcaagtctgggtgacagagcaagaccctatctcttaaatacacacaccccccccccaaaaaaatcctctggtctctgaggtcccaggctcctctctgaggcctcttgagttccccagtggctgaccccgtcctgccttcctttccatagttagacgttgtcctggagacgaacctggccacaatccgtgtgttggaaagtgtgcagaagaagctgtctcggatggcgccggaagaccaggagaagttccggctggacgactccctgggaggcacgtcggaggtgatccagcgccgtgccatttatcgcatctatggcgacaaggccccggagatcatcgagagcctcaagaagaaccctgtcaccgctgtccccgttgtcctgaaaaggtgccctgtggcgtcccgacttcccttccccttccccttcccccttccctcccctcccctcccctcccctccccactgcagggagcccttggagagctcattagtgctgtttgtcaacaggtgtcatctccaggggtggtctctgaggcctaagggtgccttcctgtatttcccagtctcccactcctgagaggagagcactgtgaccttctaggactttccaccttgcacataatacatctagacatctaaataactgctttaagagtcagatgcgaccactacactgtggcttgcattttatttaatgctgcatttcggatgccgtccggcgctagttaacaggcatttatcaagtggtcactttcaggcaggtgcagtgcttggccctgggattatgcagctgagtgaggcagacccagtccctctcttgggactcacagctgagcaggggacctgagtggttgagccaacagccatgcggagagtgctgggtgccagggaggaggtggaggaaccgggaagccggccacattggctctgtaaggccatcacgccctccctctgacgtgcacagagcccactgcacagactaggctgggagctggctgggcctgggtcctggacccccagtcaagtcccagaggaagacaggccagccctgggatgcttcagggaggatgccctggcttgtccctggtgctgacctctcttccccccgcagactgaaggccaaggaagaggagtggcgggaggcccagcagggcttcaacaagatctggcgggagcagtatgagaaggcgtacctcaagtcccttgaccaccaggctgtgaacttcaagcagaacgacaccaaggccctgcgctccaagagcttgctcaacgagatcgagagcgtctacgacgaggtaaagccttccctagccctgccggccggtgggggtggggtcctggctctcccgaccgccgggtctgtgcctctgtttccctggtggttaggcagggtagtggcattgccctttcagggctgtgttgaggcgagggttcatgtctctgtgatgcccagcctgtggcctgccctaggagaaccagcaactctgccattgtctatctgtttgtttgtttggagacagagtctcgctgtgttacacaggctggagtgcagtggtgtgatctcagctcactgtaacctcagcctcctgggttcaagtgattcttctgcctcagcctcctgagtggctgggactacaggcgcacaccaccacacccagctaatttttatatttttagtagagatgggttttcaccatgttggccaggctggtcttgaactcctgacctcgtgatccacccacctcagcctcccaaagtgctgggattacatgcgtaagccaccgctcctggccgactctgccattgtctagcgaagtctccgtccctcccgtggggcagtgatggactttggcttaggtagtgggtggcagcagccttcatttctttcttgccgactgtgccaggcaccggtgttagcaacacagaaagagtaatgcatcatctgacctcactcctgaacctgactctgctgcggcattattctgattttaccagtggggaaactgaggcacaagaggttgcatttgcctgggctggtcgcagggggccagggctctgagtcattgggttcgaggctttcggctgcatgtcctcactgcaggctcacaaggcctgagtcatagaaccaaggccagcggggccctcaggttgccaggagctgggcctgttagtagctgtgtgtagggagtgcctgcttgcaggatcctgaggtgggaagcttggcagggtgccgggcgtggtgatagccagctgtcgggaaggtccttggacactctgaggaggtggcttaggagggcacactactccccaggcagtgcccagatcatggcacgggctgcgttatcagcctggtgcccacctgggcagggggtgttgcctcacctgatttggtttcttgctcctgtcactgcacagtgagcggtcgctccttcttttacaacacagaaacggaatccacaggagccgggctgctggcccaaggcctctcccagagcctgtgggactgtggggacccccttccctcccacctcccttcccgtgggccaccctcgccccaggcccacccacaaccactctggcttcctcactctagtcctcggcgatcctcaagcccaagaccccgtataggttctgtgggtctgtggtgtctgcaaagtgcagatgatgaagtagccctggaaatccaccaatgcgaccctgagttcctggatccctccctggggctggggctgacaaagggaggggcaccaaggttcatatgcagatctctgcacatgcaggtccttgatgaattccaaagtcagaaccccattccatcacgtgatttacaaagcatggttacagatcatggacatggggaccctgcttcagaggggactgtaaaggaattttcagagtgtttatggcataaatgagacctgggggacttaggaagcagtcagagggcgatggtcacactgaagagcccagagcagggctgagcgtgcagactcctaggaaccaggtcagtgtgcttggccctaccagcctctaagccgccttgcaggggaggaggaagggaaacctcaggctgctaggagacccggtccttccctcgggagcctgcagagatggcatccacgctcattttccccaagagccctgctgcgtctgcctccctgccttggactgagggggttggggctgcccagcagaggccctgggtgccaggacagtggtgtgggaggctggaggaaggggtgattgtctaatggtgtgagggaatgaaagtcatgatctagataaagaccaaggggaggggtgagcctgggacagggttttccagggagtgagagcagatgggcatgtgcaaaggccctgcacacgcaggagggagcttggcgcggtgaggctggaggagctgtggaggggcacatcaggggccggcgtcttctgagcagcctgggaaagcctgaagggcattagttggggtgaccatgctcctgtgggccaagtcaccctggacccagtgaggagagtggttggagcaggctggtgggagctggtgggagggctggtgacatgatggtggtagcaagcacgtgcaggggctggcggggacagcagcggaggcgggggcttggtgacgatgggcgtgcaggtcttcagatgtgagcagttgcaggccttccgggtagtagatggagggcagaggcagagaggtcacggctcaccctttgcctccttgacttcatcgatagcatggtgtgggcagccccggtcgagctggaatcaggcgccaccgttgctttcagtaggaggaggtcagcctcagaggcttctccatgctgagccacggggccccgttctgtcctggagctgggctgagcgacagacccaggcttgacgctgtcagaccccctgtgaaccccgccccacatctcagaatcctcttggctcctttgtctggggtcccgggatgacttgggtctgcctcactttcggagaggggaccaggagcacatggggctgcacaagaggttgaggcaagcgacctaccccccaggccctgctgcctcaccgatgttcgccacccatcctgctctgggcagcgctcatccaccttggtggcccagttaacagcgagtcgtgaatgggcactgggggtcctctgggtgctgggtggctttccacctaatggccgcccttccccccacagcaccaggagcagcactcggagggccgcagtgccccctctagcgagccgcacctcatctttgtgtacgaggaccggcagatcctggaggacgcagcagcgctcatcagctactacgtgaagcggcagccggccatccagaaggaggaccagggcaccatccaccagctgctgcaccagttcgtgcccagcctcttcttctctcagcagctggacctgggcgcctccgaggagtcagctgatgaggaccgggacagcccccaggggcagaccacagaccccagtgagcggaagaagccggcgccaggaccccacagtagccccccagaggagaagggggccttcggggatgccccggccactgagcagccacccctgccgcccccagccccgcacaagcccctggacgatgtctacagcctattttttgccaacaacaactggtacttcttcctgcgcctgcaccagaccctgtgctccaggctgctgaagatctaccgccaggcgcagaagcagcttctggagtatcggaccgagaaggagcgggagaagctgctgtgtgagggccgcagggagaagggcagcgaccccgccatggagctgcggctgaagcagcccagtaaggctccaaagcctgccgggaggccccggggggtgcctggggttaggggtcacagctcatgatctgacatgtcctgttacttttctttctggcttttcattttaagagaattctgtgatttcaaatgggaaattgcaaacaggaagttgccagcataagacagaggtctcacgtacccctcgcccaggctcccctggccgtggcacctgtcctgggtgtagcaccctctcctgactggggaacatttgtttctcatgggctttctcgtggagccgtcatggcccagctccacagtaccctttttctttctttttttttttttttgagatggagtcttgcgctgttgcgcaggctggagtatagtggcaggatctcggcccactgcaacctccacttcccaggttcaagtgattctcctgccttagcctcccaagtagctgggattacaggcgctcaccaccatgcctggctcattttttgtatttcttttttgaaatggagtcttgctctattgcccagcctggagcacagtggcatgatctcggctcactgcagcctccgcctcccaggttcaagcaattctctgcctcagcctctgagtagctgggattacaggcacccaccaccatgtccggttattttttttttgtatttttagtggagacgaggtttcaccatcttgaccaggctggtcttaaaactcctgaccttgtgatccacctgcctcgggcttccaaagtgatgggattacaggcatgagccaccgcgcccagcccaattttttgtatttttaatagagacaggatttcaccatgttggccaacctggtctcaaactcctgaactcaggtgatccgcctgcctcagcctccccaagtgctgggattacaggcatgggccaccatgcctggcctccacagcattctcgctgccatccctgggttgccggccagattaggcagcctcggagggtggcagtgaacaccagctactcgggtttcctggtgattcccacatttgccccaggggtggcaggtgagggctgttgggccccatgggggcatttgttggggctctgtcatgccagagtttggcctgcgtgactttgcgctctccaggaggcatatggatgaggcggtgtgtctccgcaggtgaagtggagctggaggagtactacccggccttcctggacatggtgcggagcctgctggagggcagcatcgaccccacgcagtacgaggacaccctacgcgagatgttcaccatccatgcctacgtgggcttcaccatggacaagctggtgcagaacattgcgcggcaggtgagccgggccggggtggggccggccctgaggacggcggaaatggctctaccatcatttcactccccgctcgggagggggcccgtggtcagcacagcaaacctatcctgttttttcttaattgagacaaaattcgcataacgtaaaattaaccattttgaagtgtacagtttggtaacatttggtacattcacaatattgtgcaaccaccacctctgtctagttccagaacatttcatctttccaaaaggagaccccatccccatcagcagccactgcccattcccctgccccgagcccctgacatccagtcaactgctttctgcctctgtatttccctcgtgcttcattcctttttatggctctgtaatactccattgcgtgggtagctacgttttgtttctatctcttggtggacatctgggctgtggctgccttatagagattgtgagcaatgctgctctgaacatttgtgtacaagtttttgttccgtgtccctgttgacaaacctttcttgaggttaaattgacaacatggaaaaaaccttaacccacttatcctgagggagggtgggaatagtgatttcatctgcgttggttttagtagtagcaaaaacccaggccccactgaatgtcaacacaaggaaactggtcacgtaaatataaacagcagacgtcccagacgagctgggtgtggttccaggacatgggtcctgcctggtttctgccagaatcattgttcatggtgacctccatttcctggtcaccaagtaaggctgttcatcataaagtggaaaaaaagctggaaaaaaaataatgccattactctcccacccagacacagccacgagaagcatttcagacaggacgtttccttccaggttttaaagactgcttaatggagctaaaatacccaagcagaaaagtccccaaatttgaagggggcagatggatgggcttttcatcaacagaacccctgcccctgtgtccccacccagccacctgccacccatggacacccacaaccctgatttctttttcttcttcttctttttttttttttgagacagagttttgctcttgtctcccaggctggagtacaatggcacaatctctgctcacagcaacctctgcctcctggtttcaagcaattctcctgcctcagcctcctgagtagctgagattacaggtgcgcaccaccacgcctggctaatttttgtatttttagtagagagggggtttcaccatgttgggcaggctggtctcgaactcctgacctcaggtgatccgcctcccttggcctcctaaagtgctgggattacaggcgtgagccaccgcaccggcatcacaaccctgatttctacagagaggtagatccctggcctcgagctgtgtgttaacagcagcacacagcgcccagccgcatcctgggagcgtcattctgtgagattcctgtgttgagatgaaccggccaaggattccgaggaacgacccccgattccgtccacctgtctcctgaggacaggcatgggcggtgccccgtgggtgtgtctgcggtggccgtctatgtacatttctgctgctgcccttggggtaaggcacagagaggtgtgtcccgctgatggcaactttccgtttcctgggtcactcgtaccagtgctgtgcgaggccgcactctgtgtcctccctggggctcaggggcgtctctccatcagctgggagttcaaatctcggtgggctcacgttgcatttccctgatggcaaatgtggctggggccctgtcctttcatggccgttgggacatcttttctcatggaaagctatccacggtgtttgcgcctgtttccgttgcgtctgccttgttggtgactgggaggatttctgtgtctggccatgaggacttagtgaaacccatagctgcgttctgacaccttcgcttcagccccctccactttccctccgtgtgcccgaaatgggtccctgcccatcaccatccacagcagtggccactccccaggtgagggaaacacgcacggggcagcctggagagaggacacccagggcccagcacatggtgttggggaagtgacgcaggggacgccagggggctggcagtctgtcccctccccccccccccaggctgggcacccctcatgggccatggcttcggggacagcaaccttgcttgtgacaccaggagattggaccagatggtttatggaaagcattgattaatgctttaaaaaaatcccccccttccataaacaactcctctagaacctgttaaaaacaaagcaatgaaaatggggctgtctggctggagctgtagtgagagccacatgctgccctgctgtcccagctgtggctgcaccacaccccagctgcatctccctgggccaggtgctcactgcgggcccctccacactgtttgtaacctgcctcgaggccatgtctggactctgcctccctttttcttaaaaattagcattgctgttttttagcagtagcagttggcattcagtgggcacttgctgtgtgccaggtactgtctgaaacctatgcgtgtccaggtgttattgtatccattcaacaaagctgcacatggaacccccaaggagtgtggtcccctgaccagggcctgggctgtgcaggcgggtgattcacacagccctgtctgccccacgatccctgctgtttccattccttccttcttcagtgcaaaggtaaaaggagtagcagtgtatttacagccaagcatttaggggaaaggaacagcctgcactcaggccaccttcagctcattcctgggtttgctttggaacatatttttccgtgtcttttctgtgtgtttctcacacccgggcagggtttgctggtctggcctggtctgttttgttcaggtctggtctggtctagttttggtctggtctggtctggtctagttttggtctggcctggtctggtctggtttggttttggtttggtctggtttggtctggtctggtctggctttggtctgatttggtttggttttggtttggtctgatttggtctggtctggttttggtctggtctcatctggtctggtgtggtttggttttgatttggtctgatttggtctgctctgatctggtctggtctggtctggtttggtttggttttgatttggtctgatttggtctggtctggtttggtgtggttttggtttggtctggtctggtctggttttggtctggtctggtctgatctgatctggcctggtttggtttggttttggtttggtctgatctggtctgtttggtctggtttggtttggttttagtctggtctggtctggttttggtatggtctaatctggtctagtttggttggttttggtttggtctggtttggtgtggtttggtctgatctgatctggtctggttttggtctggtctgatttgatttggtctggtttggtttggttttagtctggtctagtctggtctggtctggttttggtctggtctaatctggtctagtttggttggttttggtttggtctgatctgatctggtctggttttggtctggtctgatttgatttggtctggtttggtttggtttggttaggttttggtttggtctggtttggtctggtctggtctggttttggtctggtttggtttggttttggtttggtctggtctggtttagtttggtctgatctggtctggtctggtttggttttggtttggtctggtctggttttggtctggtttgggtctggtctggtctggtctgtttggtctggtctggtctggtctggtctgtctggtctggtttggtctggtctggtctggtctgtttggtctggtctggtctggttttggtctggtttgggtctggtctggtctggttttggtctggtttgggtctggtctggtttgggtctggtctggtttggtctggtctggtctgtttggtctggtctggtttggtctggtctggtctgtttggtctggtctggtttggtctggtctggtctgtttggtctggtctggttttggtctggtttgggtctggtctggtctggttttggtctggtttgggtctggtctggtttggtctggtctggtctgtttggtctggtctggtctgtttggtctggtctgtttggtctggtctggtctggtctggtctggtttggttttggtttggtctggtctggttttggtctggtttgggtctggtctggtctggtctgtttggtctggtctggtctggtctgtttggtctggtctggtctggtctggtctggtcggttcggtctggtctggtctggtttggtctggtctggtcggtttggtctggtctggtctgtttggtctggtctgtttggtctggtctggtctggtctggtctggtctgtttggtctggtctggtctgtttggtttggtctggtctggtctggtctgtttggtctggtctggtctggtctggtctggtctgtttggtctggtctgcccacagcctgtcaggattctggtctcttcatccctgtgtcatgcactctccatcctgatgtgtttctggcctttgtcgacttcctctgtgggtgaggtggggactcccgcaggaggcggggtggccgcaccacctgctttcctcccgccagctgcaccacctcgtgagcgatgacgtctgcctgaaggtggtggagctctacctgaacgagaagaagcggggtgccgctggtgggaacctgtcctcccgctgcgtccgcgctgctagggagaccagctaccagtggaaggctgagcgctgcatggccgacgagaactgcttcaaggtgagaggaggcctggggctgggaacacgccgggaggcccggccgctcactccgctctggactcagtcctgggtggaccctggttcagcggctgggacaccggccctgctgcagagcccatgaggtacctttgacctgcaggaagcatcagggctttgggagggtggcaaaggcgggaggcgggtggccttgcgagcctgcgctgtgccggctgggctgtgccggcagtggaggctgtcagcgttcctgctccgcaggtgatgttcctgcagcgcaaagggcaggtgatcatgaccatcgagctcctggacaccgaggaggcccagacggaggaccctgtggaggtccaggtgaggccctggccccagtctgtgccacgcataccagggagcgcctgagggcagcagcatggggctcccaccagccaagcgcaggccgcgcagcatccagagaccctccctctgcaggccacaggctctccttgaggcctggtgggtggggttgcctccctccctgctcccccaccaggctctcttctgtgccccctctccaaagagcagaccactcctcctgagcaagcggttgtgtcccagggcaggaggggaaccaagccacctctccctggcccccgactcccactcagggcatcccgtggctgtgacctctgcacctcttgtgtcagggctgcatcctgttcctaatccccagcagaggagccacctgggcccagctcccagtcacaatttttgcggggacagatgtttcctgctcacctcccgcatcctggtgacagtgaggcattgacccgtgtgtgtccccagggtggtcattggggcctgcagctcccggcacctgccaacaggtccagtgtgtgtgcacattactcagctaggccaaccccattcatttcctggggctaccaccacaatgaccacaaaccacgtggcttcaaacaacagaagtctattccctcaacgtcctggaggtcagcagtccacaaccacagtgtgggccgggcggtgctcctgccaaaggctctggggcggatccttcctgctcttccagcttccgggggcttctggcgctcctcagctgtggcctggttgtgtgagtcccgctgtcactgggtcctctgtcaagagctatagtctgttggggtctccgtcagggatcagagtcctctgcagcggctctcctcatgctctggcagtggggggcacagaacccctgtgagctcctgaactcagagtccagagtaagagtggccatagccctgctgtaggggcatcacgggctgtgtctctccctgtccccagcacctggctcggtacgtggagcagtatgtggggaccgagggcgcgtccagctcgcccactgagggcttcctcctgaaacctgtgttcctgcagaggtaagaggccctgagatgcatgctctgttccttccttcctgggcccagggagtgtcccctttgtcctgacgggggctggaccatggcacactgtctgggagcacttagtaggtgcctgctgtgtgctgaggcaggccctgcccttttgaggcttgtggtttgcagtggagggattagtaaccccaggacggtgaggtgtaggaggggcaaggccaaccccacgatgcgtcagtgggtgaagagtgaatgcccggactggagggagacgctgccagagctggtggggccaggccagaggcgggtggctgtggcaggaccctggaccacctcaggtcgggctaggatggcacctatgggaccagtgggggctgctggtgggtgttcagatctgggggcatttcttgttgcttccatttgctttctgtggacccctgggaggtagcacatcttctgatggtcccaggcctgggggtttcccagcctgcaaatcctcctcccacaatgccgagagccagagtccattccacctcctttcgcccccaggaacctcaagaagttccgccgccggtggcagagcgagcaggcgcgggccctgcgcggtgaggccaggagctcctggaagcggctggtgggcgtggagagcgcctgcgacgtggactgccgcttcaagctcagcactcacaagatggtgttcatcgtgaactccgaggactacatgtaccgtcgcgggaccctctgccgggccaagcaggtgccaggggaggcctgggctgccccgacatgcccctcctcaccccaagtcctggggccctgggggtccagccctcagctgccctgacacccggcctcttcaacaggtgcagcccctggtcctgctccgccaccaccagcactttgaggagtggcacagccgctggctggaggacaatgtgacggtggaggcggctagcctggtgcaggactggctgatgggtgaggaggacgaggacatggtaccctgcaagacgctgtgtgagacagtgcacgtgcacggcctgcccgtgacccgctaccgcgtgcagtacagccgccgcccggcctcgccctgacccgccctcatgggcaccgggcaggcgcctcacagagcacagacgtgccctcggccttggtcgtgtcggggccgttttcttgaacgacgtgagaggcatctcccagcccctctgctgccggacagcgcactccagggcaggacgccgcccccgtggctcccggtctcctgtgggcctgctgtgtgccaaacctgagctacctgcacccgagccctggggctcagccccaccacaggggcgggtggacgtgctggccgaggaacaagcaatcatgtttgcgtccccgtccgtcacatgtgccaaatccctggcaggcagatggctcctgccccatattcttgccgtgtcttggaaaagtcacaggtgacagccctcctgaggcccacactttggagggggtccatgtccaagagaccctgacaaggaaggagttgagccctgggtaggcttgcttgaaaagtgagtccttccagaatattctcagagctgccagaaacatcatctgagggtttgggcatcagctctgcctggctggtgttcaggccctcagtcactttggaagtgagaagaacccttcagccaaacctttgggatcccattttgaagtccagagctggagcaggcgggcagtgccctgggagaccccgctctggataagacacccaaccccaactccagcagctggactctgggcccacaaggggagggaccccagccagtattccctcagagccggcacgaccctgctgtggggcggcgggcccagtcgtgttcctgcagtgggcaccctaggcgtatgtgtatacacgcacagatatttattcctttcgcttttagtggttgttatttctgtagcagccaagtcctgcggctccctggggctgagatctccctttgtggaactccgagagccgccctgacagtcccagccgccacccaaggagccccatccgcccacccaccctgggacccacgcggccactccagggatcattgttgtccttttgtgaggggctgaggcgactgtcccatggaggcatccaaggctttctgtgccaagaatcccaagtgactggggctggggaccacttctccaggcctctctccccgaccatgagagcccctggccctggcccctgcacaccagtaggcccagaataaccgccacccttgccatcctgcaacagctggactcaagtttccaggaagtggagatgtgtttctagaagtttcctgtggaacctggaggctcctgatgcctttgactccaggctgggcgattccgatgctgacccgtcctcctgggctccccacccccgctccccaagtgtcacacaggcactttgtacacatcctggttttctaagaagggaacttgccatcaagattcctgtaccaggcccacggccgtctcgggcagagccacctgggccccgggtgcagccggagaccccgccgagcccctcctcccagtattcccatccccgcatgcttctagggagcgcctcttttccgttcttgaggaatttctgttctggggcttgtccttcctttgcagctgttttgaatgtagttttccttttctatttatttgcacattaaagttaataattgaatattgacatcaagccgtgagggtgtgttggtcttcctgtgagagccttgctgacttcctgccaccaggtcagtgggctggacccatgagagcaaggggtggctgggtgtgcctacctgggaccaggggagtcgaagcccctccttgaaccaagatcatctcacaccctgcacctgccccgccacgacatgggagtgtcttctagaatattctttccccattccatttgcacatttagtgggaattagaagcgtctccttcgcccgagtgtctctcatgcagaacccaatttaaagatcatggtgtttgctctaaggtgtttgttctaagcttcccatgcccaacctatccgtccaggcccatgcctgcccacccaccccacacgaccaccctctgtactccttggggccccacccacttcctggctttcaccatcattttctcctcatctcctgccccctgtctgcatcccaagctccacacctgcttccgggtagcagaagccccagctctgctgtgtcccctggctgacatacctggagggttccaaggcagaagtggccagcccctccccctcagtatgggctcctccatcctctgtaggggaggggccatagcttcctcccagtgacccatgtgctccctgtacacccaagcgtctctggcagttctgaccacacccccaccggagggtcagggctcccagggagcgtggcaagccagaccggaggccgccctgtttccttctgccttgatcccatggctggggatgcccagggtcctctgtgggcccccagactggctttccttggtcagaagtgctgcaggggctgggaaaggctgtgctggtcccaggagagcagacaaagagcagatctccgaggtggccctgccctgaggggtcccctgccctcaagtagggcccatggccttgatgaggtgatatgacatgagttgagagaggttcctcactggccctgaagatgtctccgctgtgctggggaggggaccctgtggcaagggacagagagtggcctccaagagccaagggggacctcagagccaccactaccaccaggacccaaattctgcccaagtccacttgggcccagaaaaggcccccgagcagcagataaggacacagcccagctgacaccttgatctcagcctcatttgaccctgaaccaaagacccagcctcccaggctggacccctgacccacggaaacaaaaggtcatagaggcgtgtggctgtgagccacattcattatccagagatagatacagcagcattaataaagccgctgcatgtccagcacctccccttccacctccgtcaagtacggggaggtggctgagggtctcaggaacccctactgaggggggaaatgaaagaaaaaagaaaaaattaaaaagagaattaagcttttcctgtattaggctgacttgtctcagaggcagcaacaggcacagcccagacccaggaaaagtcttaataatactaagaagccaagacacaaaggaatgtgctctggagcctctcccagcactccctcaacatagggagaagaaaaacaaattttcctttgtttcatggtatgagtttatagattcctgctctctacacctagtgacttcaaatattctgttttatcagcagtggagtgaaggtcataaactgtctgagcagcctgagatagagccacctgggtgccatagtgatggccatggaataagccatgctaagcactagggcaaacctacataatggccatctgagttgcacagcaacggtcatgtctaatcctgagttatgagcctgttataatttgattaactgtctttgtcctgcctctgtatccctgctttcacgccactgtaagcctgcttcaagctaacccacccctttttaaaagtgtgtttaagtcaagtgctgtctttattctaggcccagtttttagacgttgagtccagtgggtctgagtgcactcaataaagatcctcctgtatacaccccaaggtctctcttttcctcctgtttccacaacactacatgtgatgctgacagagggtgctgggacaggggcttccagtggggccccatgaacatttattctgttgctagtgaggtgtttgtctcactggcttttgcaacatataaccagtgcttcccgcctgatgtcctcacttgctgagaatgaggctaactactccaaacagcaaactgaataccatccagcaatcacgttcctttgtatttgcccaaaggaactgaaaacttgggtccacacaaaaacctgcacaagagatatacgcagccttattcaccagtgcccaaactcagacacaaccaaggcgtccttcagcgggcaaacggataaaccatgtcacctccagacaacaggatataaaacgaaatgagccatgaagctgtgaagacatgaaggggccaggcgtggtggctcacacctataattccagcaccttgggaggctgaggcaggaggatcacctgaggtcaggagtttgagaccagcctggccaacatggtgaaaccctgtctgtcctgaaaatacaaaaattggtcaggcgtggtggcacgcgcctgtaatcccagctattccagaggctgaggcaggagaattgcttgaacctgggaggcagaggttgcagtgagccgagatcacgctactgcactccggcctgggtgacagagcgagagtctgtctcaaaaaataaaagacacaaaggggcctcaaatgcatctaactaagtgaaagaagccagcctggaaaggctgcacactgcatgattccaactatagaacactctggaaaaggcaaaagtatagaggcagtgaaaagatctgtggttgccagggggcagatgggaggaagtaatccataggtggaggtgggaggatttttagggcagtgacgcaactgtgcgacactatggtcaatggtggacatatcatgacacatatgtccaaacccatggaaggtacagtgccaaaagtgaacccccatggaaacgcggggttccagaagacagagccgtgtccatgcagctttgtccgttgcaacaaaggcaccgcttttggtaaaggacatagatagcgggggaggcttgcatgtgtggggtggggttacatggggactctgtaccttctgctgaatttcactgtgaacctaaaactgctctaaaaaataaagttttttttaaaaaagcaatttgacccaaagtcagtctcaggaggccagggggtgggggacagaacaggccagggcaggaacttgcagggacgggtgcaggcaggctgaggtctcaggaatgtgtctgcacctctgtggtttcccttctcttcttcccttctggggacctttgcaatctgggctggctgctgggtcccgcctaggtttcagattctgccccaccctgaggttggccagtcccttctctctgtggctctgggagtggagcctcagcccttggtacagtggagcaaacaaactctgatttggggccccagagaggaagcgctgggaatccaggggttggacaggctggaccccaagccctgcttccaccatggctgtccgtgcgaccctgggagtgactgtcagtcctggtgagacagggtcacagcacctgcctctcatggccattcaactgggttaatgtccctgcccagccagggaatgagaggaggtggcaccatgtttgctgctggagtgtaatggcgcgatcttggctcactgcaatctccacctcccgggttcaagcgattctcctgtctcagcctcctgagtaactgggattactggcacgcaccaccacgcccagctaatttttgtatttttagtagagacagggtttcatcaaattggtcaagctggtcttgaactcccaacctcaggcgatccgcctgcctcggcctcccaaactgctgggattacaggcatgagccaccgcacccagcctgcccatgtggcttctaacttgttccctgaccctgaccttttgctggaggcagtgaaggcaggagagagtggaggccacatccaggagcttccagggacctgaggggttggaggacaatgaaatccaggacacgccactgacttgcgcctgtctgccaatttttccccatttaaaaaagttatttaaagggccaggtgcagtggcttacacctgtaatcccagcactttgggaggctgaggcaggcggctcgcctgaggccagaagttcgaggtggtgaaactccacctctactaaaaatacaaaaattagccgggtgtggtggcatgcacctgtaatcctagctactcgggaggctgaggcaggagaatcacttgcaccctggaggtggaggttgcagtgagcagagactgtgtcactgcactccagcctgagcaacagagtgagactctgtctccaaaaaaaaaaaaaaaaaaaaaaaaagttatttgaattgtggtcaagtttatcttaatgatttttaagtgttcagctcagtggcagtaagtacattcatattgtcaccatccatctccagaactttttttttttggagacagagtctcgctctgtcaccaaggctagagggcagtggcacagtctctgctcactgcaacctctgcctcccaggcgcaagtgatcctcccacctcagcctctcgagtagcagggaccacaggtgtatactaccacactcggctaatttttgtatttttttgtagagatggttgggggggtgtctcactttgtggcccaggctggcctcgaacccctgacctcaagtgatccacctgccttggcctcccaaagtgcagggattacaggcgtgaaccacctcacccagcccagaactcttccatcttgcaaaactgaaacactgtggccttaagcactcactccccaatccccctcccccagcctctggcaccccccaacccattctacttcctgtctctatggaggtgaccactccagggacctcccatgagtggaatgactcaggatttgtctttccgtgaccggcttatttccctcagcataatgtcctcaagattcatccacaatgtagcatatgtcagaattcccttactttttaaggctgcctttttttttttttttttttttttttttggcagagtttcactctgtcacccgggtgggagtgcagtggtgcaatcacagctcactgcagcctcgacctcctgggctcaagcaatcttcccacctcattttttgattttttgtagagacaagatttcactatgttgcccaggctggtcttgaactcctgagcccaagcgatccctctacctcggcctcccaaagcactgggattacaggcatgagccaccactctgaaacagcccggcctggctgtctgccctttttaagaaaataagattttggccgggcgtggtggctcacgcctgtaatcccagcacttcgggaggctgaggcgggtggatcacctgaggtcaggagtttgagacctgcctggccaacatgatgaaacctcgtttctaccaaaaatacaaaaattagccaggcatggtggcgggtgcctataatcccagctgctcgggaggctgaagcaggagaatcgcttgaatccaggaagcagaggttgcagtgagccgaaatggcaccattgcaccttcagcctgggcaacaagagcgaacctccatctctaaataaaaaatattttggccaggtgcagtggctcatgcctataatcctagtgctttgggaggctgaggcaggtgggtcacctgaggtcaggagtttgagaccagcctggccaacacgacgaaactccgcctctactaaaaatacacaaaattagccgggcatagtggcaggcgcctgtaatccctgctgctggggaggctgaggcaggagaattgcttgaatccaggaagcagaggttgcagtgagctgagattgcgccattgcactccagcctgggcgactgatcgagactccatcttaaaaaaaaaaaaagtttttatggaaagtaacacagtgcacagaaaactccaacagtacaaaacagacacatggtttcctctcctccaaagctgtcgcgcccagcgtcctccgggaagtacctgggcagtgtcgcctgggtacagcttgtgcctgacaggggcaatgtcatcgtcacctctgcttgctggggttcccccgacagcctgtgctgccgtgttgttcccggggaggggctgttggcgggcacctccctgctttgtgctgctgtgtggatatcctcccaaggacatcttcctgtgcgtgtgtctggcagaaattcctagacatggaacccttgagtataagggcatgtgcgtcactatgttttttttttttttttgagacgcgtttcactcttgttgcccaggctggagtgaggctggagtgcaatgatgcaatctcggctcactgcaacctttgcctcccatgttcaagtgattctcctgcctcgcctcccgagcagctgggattacaggcatatgtcaccatgcctagctaattttgtatttttactagagatggggtttctccatgttagtcaggctggtctcgaactcccaacctcaggtgatccacccgcctctgcctcccaaagtgctgggattacaggtgtgagccactgtgcctggcttttttttttttttttttttttttttgagtcggagtctcgctccgttgcccaggctggagtgcagtggtgtgatctcagctcactgtaacccctgcgtcctgggttcaagagattttcctgcctcagcctcctgaggagctaggactacagacgtgcgccaccatgtctggctaatttttgtatttttagtagagacgggttttcaccatgttggccaggacggtctcgatctcttgacctcgtgatccacccacctggcctcccaaagtgctgggattacaggcgtgagccattgcgcccggtcgtgcatcactattttgatgcatcatcttcaaaccaccctgccccagcatcactggactgccggtgtgcccagcctcccctgcacagcttcccactctgctcacagagaagacggtggaggggggagcccaggcgtgggttttccgtgtgctgagggtgtcctcagccacctttttccccaagtcattgacgtgaagctgattttctcattggtggccatggaaactgcccagaaatgggagcagggcctctgagaccctgccccagctagactctctctccaggcttcagtgtctcctcctggagctgggtgttgactctgtccaagactctgctcagtcacttcctggctgatccccgagtgctcaagtgtgtgatgagattagggctcccccaggcaggaaacggccacattggacccctccctcccccatccctagttcattttattttccccaatcctcatggctcccaactaggccctcctgctcccagacccccccaagccctgtcccccatcccctgtagcccagcgctgagcacactggggccagaaccacccataccagactcccccagggcacgacgggttgaggcctctctgaggcagggagggacaacactgaggggccttgtgcagaagagggaaggggtacccccccgagcttcagtttcttcatctgcccgatgagcccccatccaatggtacccaggagtggggatgtgctggggctagaggagggaggccccctggaggctggcttggggacccttcaacctggccacctcactcagggtcagaggtcagagcaggcgagccacacaccccgaagtccccccggtcctcggcaggtgctgtccccagcatcactgtctcccctacagatgcccgtgtgtcccctgggcaagagtgaagtgaggcactcatacaggggtgccttgtgagtatggggtcagccgaggatgctgaggggctctcgaggttcagccagagtccctgacgctgggctcgtgctgctctgggggtctgaagggaccctcgctattaccctctgggaggcgcccatccttggtttttttttttttttttgccgagtctcgctctgttgcccaggctggagtgcagtggcaagatctcggctcactgcaacctccacctcctgggttcaagcaattctcccacctcagcctcctgagtagctgggaccacaggcatctgccaccaagcccagctaatttttgtatttttatgagagatggggtttctccatgttggtcaggccggtctcaaactcccaacctcaggtgatttgcctgccttggcctcccaaaatgttgggattacagccgtgagccaccgtgcctggcctagcagggctcttcttatcctgctcaccagagataggaagtcggggggtgacttcaggaaaggcccagagcccgtgatgggcgtggggattggggtgaggacagggctgtcgtgagaacagtggctgcagatgtgagcggctggcaggaagtggccacttgaaccgcagatgcttcctgggctggtcagggaccgggggtgctggctgcagctgggacccccccccctgcatcttgctggcctggcacctgggtccctgggaggcgccacactggatatagccacgtggggcagcccggtctccataacccacactccagtcctcccacgggctggctggcaagcggccctggtgggtctgcgggggcaggggcagccttcctggtttatctctaccggcgcgatctgctcgtccgcctcggctccagaagctggggctcagggtccggcgaggcaggaagcctgaggccacagcccagagcagcctgagtgcagtcatgtgggggcgactgctcctgtggcccctggtgctggggttcagcctgtctggcggcacccagacccccagcgtctacgacgagagcgggagcaccggaggtggtgatggtgagtggtcctggctttggggtgcagagatggggttacatcagagatggagctgggggcccggagctggggagggggaggccgggaagttgcgggcttcagcccagcccactctgtatcccgtctctgaccccatagggctgggctattcccttgagtgtcatgtccagctgtttcccaccagggcagaccccaggctctgagcacctccctccctgctgcttctcgtcacctgccgaggcaggggctgactgaggtcccctctctctcccagacagcacgccctcaatcctgcctgccccccgcggctacccaggccaagtctgtgccaatgacagtgacaccctggagctcccggacagctcacgggcactgcttctgggctgggtgcccaccaggctggtgcccgccctctatgggctggtcctggtggtggggctgccggccaatgggctggcgctgtgggtgctggccacgcaggcacctcggctgccctccaccatgctgctgatgaacctcgcggctgctgacctcctgctggccctggcgctgcccccgcggatcgcctaccacctgcgtggccagcgctggcccttcggggaggccgcctgccgcctggccacggccgcactctatggtcacatgtatggctcagtgctgctgctggccgccgtcagcctggatcgctacctggccctggtgcacccgctgcgggcccgcgccctgcgtggccggcgcctggcccttggactctgcatggctgcttggctcatggcggccgccctggcactgcccctgacactgcagcggcagaccttccggctggcgcgctccgatcgcgtgctctgccatgacgcgctgcccctggacgcacaggcctcccactggcaaccggccttcacctgcctggcgctgttgggctgtttcctgcccctgctggccatgctgctgtgctacggggccaccctgcacacgctggcggccagcggccggcgctacggccacgcgctgaggctgaccgcagtggtgctggcctccgccgtggccttcttcgtgcccagcaacctgctgctgctgctgcattactcggacccgagccccagcgcctggggcaacctctatggtgcctacgtgcccagcctggcgctgagcaccctcaacagctgcgtggatcccttcatctactactacgtgtcggccgagttcagggacaaggtgcgggcagggctcttccaacggtcgccgggggacaccgtggcctccaaggcctctgcggaagggggcagccggggcatgggcacccactcctctttgctccagtgacacaaagtggggaaggctgtactgggtcgaacagggtcccttcccccacttcacgtccttcctgggacctcagaatgtgaccttatttggaaatagggttgttacaactgtcactagcggaggtcactttggagaagggtgggccttacatccagtgtgggtggtgtcctcataagataaggagaggccaggcctggtggctcacgcctgtaatcccagcactttaagaggccaaggcggatggatcacttgagcccaggagttcaacaccagcctgagcaacatggtaaaaccccatctctaccaaaaatacaaaaattagctgggcttggtggctggcgcctgtaatcccagctactcaggagactgaggcagaaggatcgcttgaacctgggaggcagaggttgcagtgagccgagattgcgccactggactccagcctgcgtgacagagagcctgtctctaaattaattaattaattaatttaattcaattttaaaaagacgaaaagtgacggccaggtgcagtggctcacgcctataatctcagcactctgggaggccaagatggaggattgcttgaagccaggagtttgggaccagcctgggcaacatagggggatcccatctctacacacaaaaaaattttttaatgaaccaggcattgtggcatgcgcctatagtcccagccactcaagaggcacaggcgggaggatcacttgagcctgggaggttgtggttgcagtgagctatgattgtaccactgcactccagcctgggcaacagagcaagaccttgtctcaaaaataaacaaactaaaattaaaaaaagaagacgagagatagtgggtgtggtggctcacacctgcaatcccagcactttggaaggccgaggtgggcagatcatctgaggccaggagttcaagaccagcctggctaacatggtgaaatcctatctctaccaaaaatacaaaaattagccaggcgtggtggtgggcacctgtactggggaggtgcccacccagctactggggaggctgagtcaggagaatcgcttgaacctgggaggcggaggttgcggtcagctgagatggtgccactgcactccagcctgggcgaaagagcgactctgtctccaaaaaaaagagaagaggagaggacacagagacacacagagaagaaagccatgtggcggcagaggcagagatgggagtgatgcggacggacacaaactaagggatgccacgatgccaagcacagccaacagccaccagcagccaggagacaggcctgggacgggctctccctcacagcctccagagggaaccagccctgccaccaccttgaccctggacttctggcctgcagaactgtgagacaataaactctcattgttttaagctgcctggcatgtggcactttgtcagggcagcccaggaatctgaaacaggatcaaactctgcttcctgggccctgccagcatctctggctcggctttctgggctggatgcagcccacgacgcactggtgtctgagatggggctggagctggggctggggctgcattccctggagactcactgcaagttcctgcccaggaggctgagggcaccccatcctcagtgcccaatgctgtggccccaccaggcccagagcctggttggccattctcatgcccaccagcttctggctttgggatgtctcttgagcaaccagaatagcacccccaactctgctccccaaaacccatcactagcacggctcagcctcctgctatcccctgactgctggggaccctcgccttccctcctctcacctgcaggctgatccttcttttcactttctgtcaatgtcaccagggataaggtgggacaatggggggtgggggtggacagtgtgtgctggggggttcgggtgctgcagacctggaactcccttctgccaggatgttggcagccggttgtaagccttgcacgggacagaccacaaggggccatgccagtggctgtggaggacacagctggtgtgtggggaaggggagaagcctcagcacctggtgcacaaacacacacacagacacagacacacacacacacagagacaccgctgctcactccagggagtggcacagggcagtttcaaagaccactggggcatgaactatgggggcaaggcagagggttggagggccactgttgggctcctcattgggtctatgtctctgatcagcccaactttgggcagccctgggctgggggtgtcaggtgcccgggacacacacatgcacacacacacacatgcacacacaaagttcatgtgcaccccagaacatgtgagtaagatcagtaacgtgtattcttgtcaatatcctggagtgatcatttaccagagttttctgagatgttaaccacaggcacaagctgggtgtgtgggtatgaatggtccccaggaccaaactgcggtcccacaactgcatgtggttgtaggattatctcaaggtgcaggtgtttgacatccataaaccctcctccccaccactctgaaaggctgggctgtagacgaagacagggctcagaagccctggcctgtgggcccccaccacccggccactatgtctctgaggggccggagtctggccccatctgtggaacgggctggcgctctgggtgctgctttccaggttcccgctgctcacaggaggccgaggcccggctgtgaccctggagatgaggttttatcttacaacatcctctacagcaagtgggcacggggcctcgggctgaggaaggagccacagggcctgtcgcttgtagggtgccaggggtggggaacccaccggccagggcagcctcagaccttgatctcacaggcagcgaggggcctccgtgctggcagagatcagggctgagcggtgttggctgaaataaataccaccccggagaagatgggcaaatgcagacataagcaggtgccaggggtcacaaaggggaatcaaagtctgctggtactggtggcaggcagctggtagggccccccaaggcaggcaggttctgggcctgggggccctgggagtgggctggtcctctgggcacgaggacatcaggaactcacggtgaggaagcaccggggtcacccagccccggcagccggaagctgaaagtgcatttgctgagagccatctgcttccccgcagggccttgtgatgtgagcccgaggtccccggggggcgaaggcagagggtgcgagagctgggacagtcttagggcaatttggggtcctgggtgccccaaagggaggccggggctttgtgtttcagagaaacgcagcctgttccgttttgaagttgcccaccggctggatgttttgctaatttagtccacatcgtgtttgctcagaaagaggcttttggccacacgagtgctttctgggaatgtttcttctcccgggaacagaatgtcaggctgtgggagctgccgtggccccaggaaaatgatgcccagctccaaggctggggggttggggtgcttggagctccagctgtagctaggaaggtgggggatctcccaagggacctccagctgtcccccctgcaccacaccggtgactgctgagcccacacctgggtcccaagagtctcatcctagggacgggcagatctctgtcattctgttccttgggttcatttagaggcaggtgtcacctgggctgaggtctgcccacccaccatacagagtcacaggctgatagggacaggatgcagccagatggtgtcgtcctgctctcagcagggcagccgttaggaagagaagccgctctgactggccaggagaggagaaagattcctatggggccgccaggacttcgggatgggaccccacacccctttcctgaacccaactccacggggctcaggccagctgccacctcctcatttagatggcagaaccccaactggatgggggacacatggcccaggcctggcactgtacaactctgcctcctttccccttccagtggaccacagtgatgggctctgggtgtccatgtgcggtaagaggggagtagcttgtgtcagaccaccaaccaaatcgaaaagctacccatagcacactacccagcaatacaaaagaacaaactccaggccgggcacagtggctcacgcctgtaatcccaaagctttgggagactgagatgggaggatcacttgagcccaggaatttgaggctgcagtgcacaatgatcatgtctatgaacagccatggcactccagcttgggcaacatacagagaccccatctctacaacacacacacacacacacacacacacacacacacacacactagctgggcgtggtggtagtgtgtgcctgtggtcccagctactcaggaggctgaggcaagaggatcacttgagctcaggaggtcaaggctgcagtgagccatgaccacgccactacactccagcctgggcaacacagtgagacctcgtttgaaaaataaaagaataggcctggcatggtggctcatgcctgcaataccagcgctttgggaggccaacgcgggtggatcacctgaggtcaagagttcaagaccagcctggccaacatggtgaaaccccacctctactaaaaatacaaaaaaaattagccgggcatggtggcgggcccctgtaatcccagcttctggggaggctgagacaggagaatcgcttgaacccaggaggcggagattgcagtgagcccagattaaaaaaagaataaactatggatacacgaaacaacacaggtgaatgcaagggaatcatgctccaaagattatccgctctgattccatttacctggcattctcaaaataacaaaattacagacgggtagggggaaaatggcttagtggttgcaggtgttgaggggagagatgaagttatggaagagcagctggaaggatcctgtgcagatgggctgtttgttgactatggttgagattacacaaatctgcccatgaggaaaccgcacactgttaactacaggcaaaacttccctagtccaaaaatcctaaatctgaaatgttccaaaatccaagtctttttgagcagcgacttgacgtgctcaaaggcaatgctcattggggcatttcagatttttagattagggatgctgaaccttagctaactatataatgcaagcattctgaaatgtgaaaaaatctgaaatccgaaacactgctggtccccccagcatttcggataagggatccttgacccgtatgcgcgcgcgcgcgcgcacgcacacacacacacacacacacacacgcgcgcgtgcgcccgcgcacagctgttcgctggtgggtgttgcgtgggccagggtggagggaggatgaatgtcccactttgtccccaggaactctgagcctctgaccctgagtcactcccactgccagtggggggtcggggcggggcggaggagtcggggcaggtcgtcgggggaggttggtaggggagggaggtggggagatattgagcctatgtctcttatctctggggtgggcccagctgttacctgtcctccgcctccccttcaggctcagggtctgagtcctccacctcaaggccggctccattcagcttcacgtcctgctgtaaaggccccggggccacagaagccaggtcatccccgtaggtggaggacgacgaggccggcagccgctgctctggaaggaagggggcctcggtcgggagggcgtggcggggaggggacccaagggccgaggggaggagatccgtggcccagagcagcagcgatggtgtccccgaggctaggcggggggtagggtcctcaccgagggcgcagcagctgggaggcgcgggctccaggggcgcggcctggcggcaggcggcctcccgcaggcggcaggcgctggcgtagaccaccccgtcggagccgcacaccgggttcccctgggcgccgcagtcgtggtcgcagccgcatcgcgcgatcgccgccccctcctcaggggccacggcagggcccgactcgccggggaaccagcctgggggacgaggcaggctcgacagaccccccaccctgaaccttgcccgcgcccccacagaacctgggggtggggaagatgtccctgggtcccgggcccactaccccctcggtgggtcttggggcgcgacagttaatgggaggtcctgagccctggccttatggaatttcacgcaggtatttgcctaatacttacaaaaacagaaacagacttttaaaaagcggttgtaggagagaaaggagacagggcgtcctgtctgggccgccctgcaacaacagccccgtcccctgccgcgcctcctccgcactgaccacacccaccccaaccccacccccaccgcactgaccgctcctatcctcaaccccgccccctccgcggtgaccacacctaccctcaaccccgccccctccgtcctgaccactcttaaccccgccccctccgcactgaccacacccaccacaaatcccgcccctcagcgctgaccgcacccaccctcgaccccgccccccgcactgaccacacccaccgcaacctcatcccctcagcactaaccacatccactctcaaccccgtccccttcgcactgaccacacccaccccgttcggccccgccccccgcactgaacacacccgccctcaaccccgcaccctccgcactcacctccccctcgccgctcgaccccgccctcaccacactgaccaccctcaacccattgcgcccagtccccaccacagtgaccacaccctcactggctcggccctgcccccagtatactgaccattccccagccacttcccttccgcacttaccactcccccagccacgcccctccccgctgaccgctcctccagccccgcctcccccgtacaggcagagcgcccgcccacctctatgctgcgttctcctgactttacgttggcccctcctctgccaagcccccaggggagccctccctggcgtccgagggtgggagtcggggtgtggcaggccgcggtggggggcggcagtggctccgcgcactcacccgggccccgggcaggggcgcgctccacttcgttgcacgcgggtccggcgcacagttcccgggcgagtgggctgtgggtgctgacgttgtagaagcgagtggcctcgaaggctacgggacgagggtggcgggtgaccaagtgcaggcgcgacgggtcagggaccgggccgggccgggggtgcgggcgcgcgggcctaccgggttcgtagtagtcgtacacggagactggcagcgccgacgtcctgcccaccacgcactcccggagagcacggaaccgcacgcacgtcaggcaccggctggggatctgtggggcagcggcgggcgcaggctcgacccgggccaggaggcccggggcgctgagctcaggcccagaactggctgatttcagggatacccaggacgcgtgaaacacagaagaaacgtgatcccattttctttttttcttttacttttctttttttttttttttcctgagacagagtctcgcgctgttgcccaggctggagtgcagtggcgtgatctcggctcactgcaagctcggcctcctgggttcaaatgattctcctgcctcagcctcccaagtagctgggataacaggcgcccaccaccgcaccctgctaattttttgtatttttgatcaagacggagtttcaccatgttggccaggctggtctccaactcctgccctcaagtgatccgcctcggtcccattttttattctttgggtccttccatcccactgggaaaacgtctcaggtggcctctgaaacaccactcctttttgtgtgtgtgcacgcatggctgagcatgtgtgggtgggagtcagcacattcacgatactgtgcaatcatcacctctgtctagttacagaacggtttctttctcccccaaagaaaccccatcgccatcagcactcactccccactcccccagcccctggcaaccacaaatctttccaactctacggatttgcctgttctgggcatttcatgtcaatggaatcatgtactctgtggccttttgtgtctggcttctttcactcagcatcatgtttctgaggttcatccatgctgtagcatggatcaatgcttcgctccttcctacagatggataatatccactgcggcccctccctgctttttctaccaactgccatcagccgagggcacagagctgtcagcatggccaactctgcctggaatttattctcccagtgtcttatttttttttgtttttttttagacaaggtcttgcaggtcttgctctgtcacccaagctggagtgcagtggcacaatctcaggtcaccacaacctccgcctcccaggttcaaacgactctcctgcctcagcctcccaaatagctgggattacagtagcgtgccatcacacctggctaatttttgtgttttttgtagagacagggttctgtcatgttggccaggctggtcttgaactcctgatctcaggtgatccacctgcctcagtctcccaaagtgatgggattgcaggcgtaagccaaagggcctgggcacttttttatattttttgtaaagatggggtctcgccatgttgcccaggctggtctcgaacccctgagctcaagtgatcctcccacctcggcttcccaaagtgctgggattacaggcatgagccaccatgcccggccccagtgtcttttttatggtacaagatacttgcagggagccacaccaggcagtgaccggtgcaccctcaccaacatgcacaccagggaagcctcctccaccaaccccggctggtggtacctcatcaaagtagaagagcactcggcgtccagccacttcatacctcttcatccccatgtgcttgtcaaggagcagctgcagaggaagccagaagtcagggtcctcagactctctacttgcttcctctcccatcccctgggggcagtggtcagtgggatgcttggacttgcccacaagttaccatgggctggggtctgggtgctggtcagtgctccccaggccctgccagcctctcagcacccaggagaggacgctcaaggatggctatccccgctgggagcacctgcctcgcctccctatacactccctcaacccagccccaagcccaggtcaggcttctccgtggccaaagaggtgcccggctgagccctgccgcctgctggtgtctcagctgcactgttcaagttcccctcccagcctgggatttttttttttttttcagtttttgatttaaaaaaatccacacccactccaaggcctctgaattgaccacatcctcatcccctggtgctccgtgcagcctccttggaggggaggtgacaataggcccagctttcctgttccaccctccccacactgcagacctcctttggtccctgaaaccctcgcttcttggtcctctttctcccccagccagagccgggcagcaatccccacccccatgtccctcttccttcctgtacaaaatggggacatggcactggtctgtcttagggttgtgagggtgacagctggtctcggcagaatgtggattgagaataccccatggctccccacccagggccaaagcacatggaactttgctgaagttctaggtggcatttataatagtgtgacagtgggcccggtgctgtggctcacatctgtaatcccagcactttggaaggctgaggtgggctgatcacccgaggtcaggagtttgagaccagcctgaccaacatggagaaactccatctctactcaatacaaaaaaattagctgggcgtggtggtgcatgcctgtaatcccagctacttaggagactgaggcaggagaattgcttgaaccggggaggtggaggttgcagtgagctgagattgtgccattgcacagcctgggcaacaagagcaaaactccatctcaaataataataataataataatagtgacagtggccgcatgggagatccacctgttggagcagcccccacctcaccccatctactcctcagtagacagatgggccatttttgcccagaaaggggaggaaaaaaggggctgggcatagtggctcatgtctgtaaccccagcactttgtgaggctgaggcgggaggattgcttgagcccaggagtttgagaccagcctgggcaacatggcgaaaccctgtctctgccacaaatacaaaaattagcagggcatggtagtgcatgcttgtagtcccagctactcgggaggctgaggtgggaggattacttgagcctggaagttcaaggctccactgggaatttgagccaagatcagatcattacactgtagcctgggcaacagagcaagactatgtcaaaaaaaagaaagagaaacagggtaaaaggggagggggaggggaagggggagggggagagggagagggaagaaaagaatacccatagcattttacaaaggtctggactgccagccagcctgaccctgggtgcctaagccctacctattgttcagagatccctgcccaccgctgctcaccggcgctgcctcacctgctccaggctctcgatgtctgcccggaagcctgacagcaggggcacctccaggacagccatattggaagaccctgcatgcagccaccttccaacaacaggggagagagagaggccctagagctcaagcccagaggtggaattcaaggtcccctctccccctggagcccacacagctgatgtcccaggaagcctgccctggggcctggccggcaggccaacagcacacacatccttggctcggtcaactcagtcaacctattttacagcagggacactgagaccagagggaaagggccttgccaagggctctaggcctgaccaggtctcttgactaagcattgtgttctgtcctggacttcactctgtgtccccagcctgggaagcagctggcgaccccactctggacatggttgcacagagcagccacagctcaggtgcttcaacactgccaccctgcaggagactctgggaaatcaaccccctagctccggcctcagtttctccttctgtaacatggtggggcggggagggaggtaactgggcactctctggagcctgcaatatgccaggcgcttcctatagggcgttggggacaaggaagaggaagccaacattcagagtggagcttgcagctgcggggagtgcaccaagctggactctgatttccagaactttctgagatggggaacttggacacattcgggctgagagtcaaggtcagggcagccgttaccggggtagcggctctgatgggctgcgagtgtcatggcaaccactcacccaccaatcgtcgccatggtgacaagcatccatcaccatggcaacaaacatcttcttagggtgagggcccgctgcggccgggtcccaggctcactcttggaaaccaaggggtctggtgctggtgttatcgggcagggaccagtgtcccagccacacatcgctgtccccatccagcccacccgccccgaccatactggagtcttctgtgtccatttgcttttctttcattcatttcaaaaactggctgggcgaggtggctcacacctgtaatcccagcactttggggggctgaggcgggcagatcacgaggtcaggagttcgagaccagcctggccaacatggtgaaaccctgtatctactaaaaagacaaaaaagttagttgggcatgatggcgggcacctgtagtcccagctactcgggaggctgagacaggagaaccatttgaacccaggaggcagaggttgcagtgagccgagatcgcaccattgcactccagcctgggcgacagggtgagactctgtctcaaaaaaacaaaacaaaacaaaaaccaccactgagtgcctggagccggaagctcctcctggtcccaggaggccatcctctccgcacattgcaccctcctgggatgcccacgccagcagggcaggtggccttacctggtgcacacctccagcatcaccttgtattcctggtgatgctgatcggccgctgggtcatcatcgtcagctgggggccagtctcctcgggaaccctcagctgcggaggcaggcatggggggcgggcgtccctgggcctcaggctcctggaggcttacgagcagctggaaagctggcttggccaccgggtcaggcacattgtaggtgacatcaatctggggggtgttggaggatggaggcttagggacctgggccctccataacaggtgcagggtaggggaggagaagggcagtggggaggtgggaacagccagaattatgaggacaatgacatccatgacagttttagagactaccgttattcgttttagccttgaaatcactgaagcgggtgtaggtacaatcatcagaccagttttatggatctggggtgcagagctgtgctcagctatgtctgagtctaggggtctccctctcatccacagtgttatctgagctcccattttagagatcagaaaacggaggctagcgagagtcatcgcgggaaacttgccctctgactgccagtcagaacccgtgacatgcacctgccccagcctggtctggggctaaatccaggccacagcagggggaatgacctcgagcccttaggcaaatctgcttgagtcaatgggtcagagatccctggactgagggtcaaatggaccctctcaggtgtgggggtggcacacctgagaggacccatggccacctgccttgggcagtattagaaggctgaaaacctgtcctgcagtctggcatgctgctgagttcagaaccctctgggggtccctggggttccactgtgtgattggagggaatggggcacaggaggacaagcccaagatcacctcgtgctccccaaaacctcacctgcatcaggcagcagccgtcccccttggcactcacaaacagccccgtggggaggctggggatctggagacagaagtcaccgtgaggccctgctgacccctcctccaacaacccccaaaccctcatcccaggaacacgcaccgctgctgtctgcagaaccttctggttggtcctgtgcagctcgaaggtttcctggtagtccaggttggtggaggccagggagacagtgaggttgatgcctccagcataggacaagatggcatattcagccaaggcctgcagagccacgcaggtgtcctggggatggaggaggagacggccatcaaccctgagactgagttggccagtggtcccctgaaccccgtcttggaagcctagcctaaaacaggcaccaacggggctggaatagagactggacccagtgcagacacccatggcactgggggcctcaggacagccaggttggtgtgtccccagaggcagaggctgggctcccatgggggatccaggggcatctgtccctcacccccaacccctgccctctttggggctccataaggtgagaaggggccagactgcctggccacctcagagctcaaaacaaggactgcagggaccccacccacccagccctgagcccctccctctggccctgcccggctcgcctgagtggaggagaagcccccaagtgcatttcgctgctgggacagccacttcaccacaggcagggcggcagccacgtcacccagcagagtgtaggtcagaagggcgtaggctgtcatttccacctcggccgagaccactgcaatggaagaggcccactggggacttttgacacagggacatggacccagtgcatggaggtatggccaaggcaggcacccgggagctggggtggccagtacctgactgagagaccctgtcactgaagctcaagaatgtgcccttgtccacgtcccaggaatttgacaggctccagtgggtgaccccatctgcaaggaaaggagtggtcaagagctataacccacccagtgtgtagcctggcatcccatggagcgcatccaagcatggggtctaaagaaaaggtattgtgggaccccagtgggagaagagtatcaggggaagacagctggaacaggaagggccttggggctccatctcagatctgcaaacctatggcagccccagcccttcctgtgcccctggcagacatcgtgaatcaatggctacccaaccttacccctggcagacatcactaatcaaaggccaccttccccttcctggacacagacatcactagtcaatagcctccctcctgaccaggtactgatccagcccctgatgttcctacttagtgcccaagcagccacactcgacttgcaaaggctcaaagattctggccaggcacagtggctcacgcctgtaatccgagcactttgggaggctgaggtgagtggctcatttgaggtcaggagttcaagaccagcctggccaacatggtgaaatcccatctctactaaaaatacaaaaattagctgtgtgtggtggtgcacacctgtaatcctagctactcaggaggctgaggcaggagaattgcttgaacccagaaggcagaggttgcagtgagccaataccgagccactgcactccacactccagcctgggtgacagagtgagactgtctcaataaataaataaatacataaataaaaataataataataatttaaaaagaatggcaaggcacggtggctcatgcctgtaatcccagcactttgggaggctgaggcaggcggatcacctgaggtcaggagttcgagaccagcctgactaacatggagaaactcatctctactaaaaaatacaaaaaattagctgggcatggtggtgcatgcctgtaatcctggctacttgggaggctgagttaggagatcacgccattgcactccagcctgggcaacaagagcgaaactccgtttcaaaaaaaaaaaaaaaaaaaggaagaaaagaaaaaaaaaaaaaaaaagaaaaaggctccaaggattctgagctcgcatgaggtgtaaagactctcaaatccagagagaaaccagcccaccaccaccacctcccactccatccctggatcctctttaaacttttttctttcggaagcaatgaaaacaattcttcaggtggcatcttaatgcttaagcagagaaacctgtctgagccccagtgcagctgctgggggtaggggtggagtggggaggtctgggtgaagtaggaggagactaagtttgggggcattctgagaaagtcaaagctcagggattggagtcccagtggggtgatgattttgtaggtggggagactgacagctcaaaaaagctttccagggctcactcagcaagtggagggaagggtggaagcgagacccaaccctcccctgtctcccagcacccctgtcctgggatgatttccaggaagcctggccggaggcgggggatgcgttctctgctggggatccctctctgagaactccccttccagaggggttggcatcccagatttcacaggcaaggaaagtgatgcttggggctggtgtgacttggacaagccacttcctcaaataaagtcactagcagatgcgataatgaatgaatactataatcaacaaagcaattgacaagcaaaaggcatctcgtcagtttccctttctccttccttccttcctttcttcctctccctccctccctccctctctctcttctctccctccttccttccttctttccctttctttctttctttctttctttctttctttctttctttctttctttctttctttctttctttctttctttccttccttccttccttccttccttccttcttttctttctctttctttctaatggcattatctcagctcactgcaacctctgcctcctgggttcaagtgattcttgtgcctcagcctcccgagtagctggggttataggcacctgccaccacacccagctaatttttgtatttttaggagagacggggtttcaccatattggcccggctggtctcgaactcctggcctcaagtgatctgcccaaagtgctggaattacaggcgtgagccaccgcgcctggtcgactcatcagttttttgttttgttttgttttgtttttgagacggagtcttgctctgttacccaggctggagtgcaatggcgcgatctctgctcactgcaatctccgcctcccgggttcaagcgattctcctgcctcagcctcctgagtagctgggactacatgactcgtcagttgtgataaatatgttcatgagttgtttaccagactccacagtgggcttcccgacgctgtggcctctggggagggccagggacacctacctcgcatgatggccaggctacggagcttgcgcagtgcctcaggggctgccgggctgcggagcagggtcagcgcgtaggtagtcagggcacagctataagggtccatggccaggggcgcagcagactccaggaagtgcctcgctttgtcagtggagcctctctcctcctgcagggtggggtgggaaggtgaaacctgggaggctgctctgcccccatcccacccacccactggcttctgaggcatccccgaggagagctctgggtgactcctagccccttgctttgcatccttctgtggctctcactgcctgcagacccaattttcaaaccccatctcctttcttttctttcttgccttttttttttttttttttttttggtaataggctgggcgcaatgtaatcccagcactttgggaggccaaggtgggtggatcacctgaggtcaggagtttgagaccaccctggccaacatggtgaaaccccatctctactaaaaatacaaaaattagctgggcatggtggcacatgcctttaatcccagctacttgggaggctgaggtaggagaactgcttgaaccagggagttggaggttgcagtgagccaatatcgcgccactgcactccagcctggcaacagagtgaggctccgtctcaaaaaaaaaaaaaaaaatacagacagcatcttactctgttgcccaggctggagtgcagtggcacgatcatagctcactgaaaccttcacttcctgggcttaagcgatcctcccgccttgacctccccagtaactgggactacaggtgcacaccagcacgcccagctaacattttattttttgtagagatggagtctcactatgttgcccaggctggtcacacattcttgggctcaagcgagcctcccaccttggcttcccaaagagctgggattacaggagtgagccactgcccctggctcccattaccattcttgtaagttggcactcctttttccaaatgaggtctggccaggatgcccaagtgcatggcaaatgagcacagtgatactctaggggaagcaggcagagtcctggccaccctgtcccacccagccccatggccaggtctttgttaagacagctagctaaggccaggtacagtggctcatgcctgtaatcccagcactttgggaggccgaggtgggcagatcacttgaggtcaggagttcaagaccagcctggccaacatggtgaaattccatctctattaaaaatacaaaaattagccaggcgtggtggtgggcgcctataatccaagctattcagaaggctgaggcaggcacaagaatcccttgaacccgagaggcagaggttgcagtgagccgagattgcaccaccgcactccagcctgggcaacagagtgagacctcatcttaaaaaaaaaaaaaataatagaaataaaaagctggctcctaagacctccacagcccaggccctccccagcctccaggcctggtcacctccttagagaagcccaccagccctgctcatgccctccctagaatgtgatctgttggaagacagggaccaagtccagaatctactgatggttttggttcagagaagctgcccaataatattatgtggaagaaatgagtgaccagaagcattaacaaatttagcaatggaaccagagtcttctggtggcccaatagaggtatggagttgagctaactctgctttcggaactgtcctggtcatagaaagaatgtttccaaagctttccatccttagaccaggacaaacgtgggaactgtccctaaggtgtgacattgagatgccctttgggaggcatgtgccagggatgaacccggctgactagccagaccctaggactggccctcacaagtccattgcctgggggtgggggaaggttggacatccccatcccaggggcaggaacagtgacatgggagttaccccaggtcacgcgggccaggacgggtctcaaggacgctgcggagaccacaccaagcagggatggacccagcccggccccagctgtgcagatcctcccgtttacagacaagcggatgcaacggaactccaaggggtcaaggtcatttgctggttgccccccagctcatctgattccagcacaggtgtagcgggttgaacggtggcccaccaaaaagatatattccctgggacctgtaaatgctgacttatttaggaaatgggtctttgcagatgtaattaagagtcttgagatgagatcaccttggattaaggtggcctcaaatccaatgacaaatatctttaaaaaattttttttggctgggcacggtggctcacgcctgtaatcccagcactttgtgaggccgaggcaggtggatcatgagatcaggagatcgagaccatcctggctaacatggtgaaaccccatctctactaaaaatacaaaaaattagctgggcgtggtggcgagcgcctgtagatccagctactcaggaggctgaggtggaagaatggcatgaacctgggaggcggagcttgcaatgagccgagatcgcgccactgtactccagcctgggcaacagagcgagactccatctcaaaaagggaaaacaaacaaacaaacaaacccatctctactaaaaatacaaaaatagccaggcatggtggcccatgcctgtaatcccagctacttgggaggctgaggcaggagaatccttgaacccgggaggcagaggttgcagtgaactgagatcgctccattgcactccagcctaggcaataagagcgaaacttcgtctcaaaaaaaaaaaatttgtattagagacagaggtttcactgttactcagtgttactcaggctggagtgtagtggctattcataggcacaatcccactgctgatcggcacgggagtttttgtttgtttttaaaacaatctcatactgtcacccaggctggagtgcagtggtgcaatcttaactcactgcaacctccaccttccaggttcaagcgattctcctgcctcagcctcccgagtagctgggattacaggcacgtgccatggtgcctggctgatttttgtacttttagtagagataagcttttgccatattggccaggctggtctcggactcctggacccatgtgatccacctgcctcagcctcccaaagtgctgagattataggcatgagccactgtgcttggcgtccaatgacaagaacctttaactttttttttttttgagatggagtttcactcttgttgcccatgctggagtgcaatggcgtgatctcagctcaccgcaatctccgcctcccaggttcaagcgattcttctgcctcagcctcccgagtagctgggattacaggcatgcgccatcacacccagctaatttttgtattttcagtagagacggggattctccatgttggtcaggctggtctcgaactcccaacctcaggtgatctgcccgcctcagcctcccaaagagctgggattacaggcaggagccactgggcccgccttttttttttttttttaaattagtgacaggtctcactatgttgcccaggctggagtgcagtggctattcatacgcacgatctccctactgatcagcacaggagttttgacctgctccatttctgacctgggccagttcatccctctttggacaacttggtcatcctgctctcaagaggtcaccatattgatgctgaacttagtgcagacacttgattggtgcagtgcactacagcccagaactcctgggtcaagcaatcctcctgcctcagcctcccgagtagctgggactacaggaatgccctgctgcacatggcaacaagtgttgtttaagagacgagaaggggagaagacagaggagaaggtcacacgcagacaaaggcaggggctagagtgatgcagccacaagccaaagaatgcctggggtccctggaagctggaggcagcaaagaaagctcttcccttagagcctgcagagggagcaagggcctgccaatgccttgattttgcacttctggtctccaaagcaatgagaatgtatttctgttgttttaagccacccagtttgtggcaatttgttatggcagccacaggaaatgaagacagcaggttttgcctcctttggggaacgatctaagacaggggtccccaacctccgggtcacagactggtaccggttggtggcctgttaggaaggggctgcacagcaggaggtgagtgacaggtgagccagcaaagcttcatctgtatttacagccactccctatcgcttgtattaccacctgagctccacctcccatcggaccatcagcagcattagattctcgtgggagcatgaaccctattgtgaactgtgagcatgtgaggcatttgctggcagactccttttttttttgttctttttttttttttgagacagagtctggcttggttgcccaggctggagtgcagtggcacgagcttggctcactgcaacctctgcctcccaggttcaagcgattctcctgcctcagcctcccaagtagctgggacttcaggcatgcgccaccacacaagctaatttttgtatttttatttttattttattttattttttgagacagagtctggcactcttgcccgggctggagtgcagtggcaccatctcggctcacggcaagctctgcctcccaggttcacgccattctcctgcctcagcctcccgagtagctgggactacaggcgcctgccaccatgcccggctaattttttgtatttttagtagagacggggtttcaccagattagccaggatggtctcgatctcctgaccttgtgatccaccgcctcagcctcccaaagtgctgggattacaggcgtgagccaccacacccagacagtttttgtatttttagtagagacagggtttcatcatgttggccaggctggtctcaaactcctgacttcaagtgatctgcctgccttggcctcccaaagtgctgagattacaggtgtgaaccactgcacccagctggttgcacactccttatgagaatctaaagcctaatgatctgtcactgtctcccatcactcccagaaaggacagtctagttgcaggaaaacaagctcaggctcccactgattctatattatggtgagttgtataattatttcattatatattataatgtaataataatagaaataaagtgcacaataaatgtaatgctcttgaatctcccaaaactaccccctcttccccagtccatggaacaattgtcttccacaaaactggtcccttgtgccaaaaaggttggatactgctgatctaagagaccagaactcagaagaccagggagaaacaactgctgccctgcagggcaggccttcaggttcagaagagaaataggttggaaggctatggagaaggcagaaaaagattcttgggagaagtgaagtgacctcaagggataggaaggaggtagagggcctgttgagtgttcactgaagacataagggagggccaggcatggtggcttatgcctgtaatcccagtactttgggaggccaaggcaggaggatcacctgaggtcaggagtttgagaccagcctggccaacatggtggaacctggtctctactaaaaatacgaaaattagccggatgcagtggcacatgcctgtagtcccagctactcgggagtctgaagctgccatgccatggatcccaccctgcaaggggactcacagccctcaccccaagccaaagagaatcacttgaacccaggaggcggaggttgcagtgagctgaaaaaaaaaagtctcacctcaagatatgtgtcataaaagtgtacatatcttgttgtccatagtgatatggacaatgagaagattggaaagcttccagaggagagaacaaacgagatacaaaggatagtactcagaatgacatccgacttctcagtggaacacaggaaactagaagatgatagaacatcatcaattattctacaggaaaacaatttccaacctggaattctatacccagcccagctatcatacagggccagaataagaatatttgcagacatgcaacgtctcaaaaaatgtgcctcccaaaaccctttctcagtaaaggagggtagcaattgtgcagcatcctgggtgctgtccattccaactcgagtgggggccaagggctctggcagggaagtttccagaaaaatgcatttgggaggtgacatatttgaccacttccatgggagatgtggaggaggacttctgaggtatgagggggtgtcatggaatacgtgtgatcttcctcagaatccatatgttgaagctctaactcctaatatgatggtattaggagttggggacctttgagagataattaggtttagactgaggtcacgaggatggggcctccaaaataataggattagtgtccttatatgaagaggaagagcactagagctctctctccacatgcacacactagggaaacgccatgtgaacatacagtgagaaggtggcagtcaacaaatcaggaagagagccctcaccaagaaccaaatctgcctgtgccttggtcttggacttcccatcctctagaactgtgcaaaataaatgcctattgttgaagccacttactccatggtattttgtttctgcagcccaagctaagacagggcattaggaattcagcataagaatttggtcaggggagaaccaattcagcccataacacaaggcaaggggccctctggacattgtgcatggtgggggcggtcttaggtcacagcaaactgtagacccactagttgtctggattgtgagaccaagaatcctgagaagtgcccaaactcataatttatcatgagagattgtagaattgatgtaggtattagggagggcagattcttctcacccagggctgagatccatcgtggaagccttctctgcagagactgtgccatcccccaccccaggaaagcctcatagaagagactatggccctcaagtctcttgggccatctaagccccatccagtaccaactgtctctgaatatcctaacccctttccctgcaaaaacatgcatgagcccaacattttgtagggttccctgaagccaacccttgggtcactggccaggaacctgaactagcctgaaatgattctctgaaggaggtctaggggctgtggacagtcatgggaggctctgtactcagggcacctccccagcccccaacatgtgcccaatttccccctagtagcatgggaatctctctctcctctgctcagattacaagaaactggatgtaatgtgaccattgttgatgaaaagcatgaaaaagcctcgataatgagcagaaggagggcagggaggaagaaatcacccctggcataaaggagggaaccttccatttgctcctccagtgcccagccccgagtctccccaaaccccttctgtactcacctctgaggctgtgcctgtttccaggagagcaaccaccacgtaggctgtcagcgggacagtgccgtggatcccaccctgcaaggggactcacaggcctcaccctaagccaaaggagacagtccacttccccccacttcccccaggcagctccagggagtaggaacaggcaggtcagggctggggctctgggaggaggtgaggggcccgggaaggaggctcaaggggccactcacctggatgtccttgttcaggaccctgcccacggccaggaaggagccatcggcctgctgctgctggatgatccagctcttggcggcagccagctcccgggggtccacgaagataaagctgcgagcctgtgcgaaggacttcaggacaaaggctgtgagcctgaaagaggacagggtgtcagctgaggggttgcagaatggtcagcccccacatgctggctgagggattgcagcaagctcctggcaccacccccggcctccatttcctcatctataagatgggaggggtcccatctgtccccacagggctgtcagagtggaggagggggcacattgcccagcacccagtggggcttgaagacggagctctctccttcctacctggacctctaccctagtggcattcaggtctgctccttgctcggcactcaaggcccttctgtgagctggtctagccctgcctgtcctgccatgtgaggaagacccttctggttgccgacctcacagccatttcttgcttggtccttgccaaaaggcccctgatctcattcaggggccagcagccatgtgccctggagatctgtgcttctctgtggtcccagccagccagtcatgggcattccagtttctgagcctgggaatggctttggaatgggcatgtgatgcaatgctgggagcagctgcagccattttgccaccatgaggggtgcagccatgtgccaagggagggaatacccagggatggaaggaaaaaaacgagccccagtgcactatggggctgctgaattagccaaccatagcacctccccagccctgcagtgtgagctgatgttcagaattgctctccagcccgttttctgttgttttcagccaaaaacatctctgttatgtggcctgtccctcatccaccccatctcccttgccctgcttttgcaggtgccaccctgagtaagagctggcaaggccagggaatgaatgcatgaacaaatgaaggagagaagcacaggatggaagccaggaggccatgagggatgaaaaccaaaattgtcaggagaggaaacttcgcaaattcaggatcaatgaataagctgtcttcaaaatcaagtggctctaggctctttatatgaaccacaaaaatgggatgcattagcctgcccgcctgcccgcctgcctgccttccttccttccttccttccctccctccctcttcctttcttctttctctcttttctttctttttctttctttctttctctttctctctctccttcctttttctctctctcttttctttcctacttttctttcttgattttctttcttctctctctctccctccctcccttcctctctctctctctcttgctttcttgcttttcaagacagggtcttgctctgtcacccaggctggagtgcagtggtgcagtcctaactcactgtagcctacaactcccagctcaagcgattctcccacttcagcctcccaagtagctgggactacagggacgtgccacgacatccagcgaatttttaaattctttatagagatgaggtcttactatgttgcccaggcaggtctcgaactcctgggctccagtgatcctcccacaatggcctcccaaagtggtgggattataggcataagccaccatgctcactgcagcctctgcctctcagggtcaagcaattctcgtgcctcagcctcctgagtagctgggattacagcctcccgagtagctgggattgccaccatgcccagctaatatttttgtatttttagtagagacggggtttcaccatgctggccagactgatctcaaactcctgacctcaagtgatcctcccaccttggcttcccaaagtgctgggattcaggagttcaagaccagcctgactgacatggcgaaaccccatctccactaaaaataaaaaaaaattagccaggcgtggtggcgggcacctgtaatcccagctactcgggaggctgaggcaagagaattgcttgacctcaggaggcggaggttgcagtgacctgagatcgcaccactgcactctagcctgggtgtcaaaatgagaccctgtctcagacaaaaaagaataaataaataaatagataaaataaaataaaatatacccaaagctcatccaggccgttctccctctcaggtacctcaaatgcatcctcttctttctattcccatgttccctggattagccaggagaccccatggctcccaggctcatccccaccccattaccagctatgcacactgcaaccagggggaaactccatgcattttgggcacggcagggaaaggaggcaaggacagaaccaagccagctgtgtgctgggaattgtggaattcccatggtctagcatactgtgctctctactttcccactgtaaaacgcaaacaggataaatgttatcaagtgataaaaagaaatgagctctcagccggattcagtggcccatacttgtaatcctaacaccttgggaggctgaggcaggaggatcagttgaggccaggagtttgaaaccagcctgggcaacatagtgagaccctgttattcataaacaaacacacaaataaataaaaaatgagtgtgtgagtgaactctaatgtagattatgaaccttagttcataacgttttgatgccggtccatcaattgtaacaaatacagcacactaatacaagatgcctatcacatgggaagctgtgtatgggggtgtagaggtgtatgggaactctgttctatttactcaatttttctggaaacctagaactcttctaaaaagtaagatctatggccgggcgaggtggctcatgccagcagtgtttgggaggcagaggtggaggatcggctgaggccaggagcttgagaccagcctgggcaacacagcaacacctggtctctactgaaattcaaaaaaattagctgggcatggtagtgcatgcctgtggtcccagctgcttgcggggctgaggcggaaaaattgcttgagcccagaaaatcaaggctgctgtgagccctgattgtgccaccgcactctagcctgggaaacagagcgagatcttgtctcaaaaaaaattagttaaaataaataataaaaagtaaagtctaatgactatctgttatctgaaatgcttggaaccagaagtgtttcagattttgaatttggattttggaatatttgcatttacgggaatctcttggtatctgtaggggactggttccaggacccccaaggataccgaaatccactgatgctcaagtccccgatatacgagtgtgtagtagttgcatataaccgacacatatcctcccgtgaactttattttttatttttatttttgagacacagtctcaccctgttgcccaggctggagtgcagtggcacaatctcggctcactgcaatctctgcctccaggttcaagcaattctcctgcctcagcctcccgagtagctgggactacagacgcccaccaccatgcccagctaattttagtattttgagtagagacggggtttcgccatgttggccaggctggtctcgaactcctgacctcaggtgatccgcctaccttggcctcccaaagtgctgggattccaagcgtgagccacagcgcccggcccctcctgtgtactttaaagcatgtcttgattacttagaacacctaatacaatgcccacatgtcacttcatttgcatgaattcaatattgtactcagcatgcagcaaattcaacttttcgtttttggaactttgtggaatttttaaaactttttttttttttttttttttaagagatggagttttgctctgtcacccaggctggagtgcagtggcacaatcatagctcactgcagccttgaacttctgggctcaagggatcctcccacctcagcctccccagtagttgggactaaggcatgtaccaccacgcccagcttatttttaacatttttgccgagatgaggtcttgccatgtttctcaggctggtctccgactcctggcctcaaacaatcttcccgattcagcttccccaaagtgcagggatgacaggcacgtgccatcacacccagacttttttttttttttttttttctgaatagtttcgatctgtagttgattgaatcctgtggaactcacagatacggagggctacctgtatacttgggcatcccaaatgcaaaaaatctgaaatgctccaatgaacatttcccttgagcatgaggttggcactaaaagcatcttggagcccaggcacggtggctcacacctgtaatctcagcactttgggaggctgaggtgggcagatcacctgaggtcaggaattcgagaccagcctgggcaacatggtgaaatcctgtctctattaaaaatacaaaaattagccaggcatggtggcaggtgcctatagtcccagctactcaggaggctgaggcaggagaattgcttgaacccaggaggtggaggttgcagtgagccgagattataccactgaactccagcttgggtgatagggtgagaccccatctcaaaaaaagaaaaaaaaaaaggaatagaatagaatgaggcagaagtaacagcctgacttgtaagaccaagtaacaaaaggcgctatggcatccttcccgctttctctcttgaattgctcactgtgagaggaagccagccgccatgttgtaagaacactcaagtagtccctatggagaagtccatgtggtgagcaactgaggcctcctgccaacagccatgtgagggagccaatttggaaacaaatcttccagccccagtagagccttcagatgaagacagcaacagccaacaccttgactgcaacctcagcaaagatccccaggcagaaacacccagctaagctgctcctgaattcctgatccataagaattaatacataataaatagagataatacgtttgttgttttaaatggctacatttggggtcacttgttacacagcagtggataactattgcatctctcacagggtctttctcctgcactgggcagcgaggacctggaggtaggaaccatgtgttcctttttcccccaggatgaagaccagagcctagctcactcaatgaataaatgaatgaatgtgcgttgagtataagggaacccatctagaacagatcccaagttttcaggctccctggcaggatcttggagccttatggtaagtagttaggggaggtgctaacaggacggcactgcactgagtgtaccacatgcttatcccatggatccaggttcttagagggatgtgtggtaaggaaacaggctcagagaggttgatcatcgggtctaaggccacacagctcacatgagacagagctgaggtttgtccagcttcggggtgggtgctgctgccactgccctgcgctcactgcctccttgtcctacagggtccccaggaagacgtccatgtttggagaccaacaggaatgtttcaggaggtgagaggggacctggaagctgctgacttccatgcacacagtgaaatttgatttttcagccatgcgcggtggctcacgcctgtaatcccagcactttgggaggccgaggcgggcggatcacaaggtcagaagatcgagaccatcctggctaacacggtgaaaccccgtctctattaaaaatacaaaaaaagtagccaggcgtggtggcgggcgcctgtattcccagctactcgggaggctgaggcaggagaatggcgtgaacccagggggcggagcttgcagtgtgccgagatggcgccactgcactccagcctgggtgacagagcgagactccgtctcaaaaaaaacaaaaaggaaatttgatttttcttgctcatgctgagagtttaatccccggaagatgctgaggaggtgtgtgcacactgagtgtctaggccgggcacggtggctcacgcctgtaatcccagcactttaggaggccaaggcaggcggatcatctgaggtcaggagtttgagaccagcctggccaacatggtgaaaccccgtccctactaaaaatacaaaaattagctgggcatgatggtgcacacctgtaatcctagctactcaggaggctgaggcaggagaattgcttgaacctaggagatggaggttgcagtgacccaagattgcaccactgcactccagcctggggaacagagttagactctatctcaaaaaaaaaaaaaaaaaaaaaaaaggtccaatgcgtcacaacttgctaatcctggctggtggaggcctcctaggggctgctggggctcagccagcttttggagagtgactcagtggctttagctgtccctggggtgggcggggcctctgcttgctaagacgtgattggggccttgcgttatcagctgtcggcaaggcagggccctgggactagagctgggacagtgtggatgagctcctggggctgggggaggctgggtgagtcgccaaccctgggcccctctggagctaggtaagtgatgctgcccatggcaggaagtactcagccacatgtccccactccctgggatcctggcactgtgactgtgcagtggacactctgttggactaaagacagggcagtttccacgctcacagctgctgtcggcactaccagggtggcaatctccgagaaggagtccggcgatgggtacaggagttggaaagtgactcacagtctcaggtgaaccccatgatgatgccaagaactgcaatagcctgaggatatcaggaaaacaagacccaggtgtgcccggcctcccaggggccctccctgccctggtctcctccctgcagttaccacagaaacaagatcccaggctgctcctgcacacagcacaccccagcctcaaggtgctggtctggcctctgacccctctgccctgccatctcctcctgctccagtcaccgctattcctgagtcctgggagcttgaggaagcccagggcatccagggctcactcccaaggggccagagagcagggcatggagtcttgctcactgtggtaacagcagcagaaacaggaatggttacgatcaccagctctgcactggccccaagccccaacctccatctctggagctgggaccaccacagtctttacttcccagctgtgttccctgtcatccggggatcaggcgccaagtgatctggtcacactgcattggatgtgaggccatggcgtcgggcggggagcctcagaggcaatgcccagggcggtggggactcaccacatgctccccgatgcgtcccgctccccaaacgcgctgtaggagccatcctggcgcttgtaggtcagctggcgctggtagcctgtggggcaagcagagaggaccctgtcctgttgagtggcctggcccaggcccgcccccagggacctacaccactctgccgtcccctaccccggatctccgaagccacaccacatgtggggtccctggaattgcctcgaatcacatctggagtccttgaaactgccatacactcacatctggggtccctgaaactgccccataccacatgtggggttcttgaaactgctttataccacatttggagtccctaaaactgctccacaccacatctgggctcactgaaactgccctgtgtcacatctggggtccctgaaactgccccacaccacatctggggttcttgaaactgcctcatactacatctggagtccctggaaccgcagcgcaccacatctggggtccctgaaactgccccacatcacatctagggttcttgaaactgtctcattccacatctggagtccctggaactgctccacaccacacctggggtccctgaaactgccccacactacatctggggtccctgaaactgctccacaccacatctggggttcttgaaactgccccatacccacagcacatctggggtccccgaaactgctccacatcacatctagagttcttgaaactgcctcataccacatgtggagtccctggaactgctccacactacatctgaggtccctggaactgccccacaccacatctggggtctctgaaactgctccacacatctggggttcctgaaactgctccacaccacatctggggtccttgaaactaccctataccacattgggggtccctgaaactgctccacatcacatcggggatccctggaactacctcacaccacatctgaggtccttgaaactgccccacactacatctagggtggctgtaacctccaactcattcatcttgtttactgacattgccccttcgtgactactggtcacacactggccttcggtcactcccaggaggtcagcaaaaccaccatcttggggcagcgccctctgtcccccacagccctctgtccccaggcgtgggggctgctccaactgctggggcgagagcttgggaagctcagagaactggtggtgccggggacagggaacggagcagggaacgagggggtgaggtgagaggccggtgggccacagggcctccaaggctgggctgggagtgtggttttcctgcaagggcatagggagccatgggtggcgtgtgagtaggagaagagtgtgaggagacatatagagccagtggaccgtagggtctggacagaaagctggggacggggaaccctcccagtgtgcaatgatgagtttggacccagtggcggcgacagaggtggggagccttcctggggtgaaggcagagctactcagccagacacagcctgtgagggaaagaaggacgaatctgagggcaccactgtgtgtggtctgagcctcaggaaggacagggctgtgtccacagagacaggaccggtgaccaaagaaattctgtactgggtgggtcctcccaaattcacatccacttggaacccaaaaatgggaccttactggaaataaaagatctttacagatgtcattaaggttaggatctccagatgagagcatcttggatttatttaggatgggccctaaatccaatgacaggcatccttgtaagagaaaagagaggccgggcatcgtggcttgcacctggaatcccagcactttgggaggccaaggtgagaggatcacttgaggccgggagttcaagaccagcctggacaacatagcggaaccccatctttacaaagaattggctgggcatggtggtgcacacctgtagtcccagctactcaggaggctgaggtgggaggctcacttgagcccaggagttcaagtctgcagtgagctatgatcgcaccattgcactccggcctgggtgacagagcgagaccctagctcttacaaaaaaaaaaaagaaaagaaagggaattagtcacagaggtgacagccatgtgattgtgaaggcacagagcaggctgatcagtctataagccaaggaactcctggagccagcagacgccaggagagaggcctgggacagtctccctcagagccaccagtaggaaccagctctgcggacacctttatttttgacttttggcctccagaactatgaggagatgacacatttctgtcgttctaagccacccggtttgtggcattttgttgtggcagttttaggaaatgaacacaagtgggtttggggggaagatggcgggggttgatttggggtttgttgagtctgaactgcgagttggctggatgcacacagggtccggctgtcccctggaggtacaggctgttattcacgaggagggctcattcaactctgggtggtgtttaaggacctgagcctggatggatccaccagctggtgtccacccatctcccagaccctcacaagtgctaatctgagcccccaggacctggcctcagtggacttggccttcctagctgtccatgatcagccttcaagatgccagactttcagcctagagcaacccctgactgtttcttcttctttattcttttttattttttacagttggggtctcactctgtcaccctggctggagtgcagtggcacaatcacagttcactgcagcctccaactcctgggcccaagtgatcctcctgcctcagcctcctgagcagctgggactacaggggtgtgccaccatgtctggctaacattttttttattttttgtagagaccggggtcttgctttgttgcccaggcttgtctcaaactcctgggctcaagtaatcctcctgcctcggcctcccaaagtgttgggattacaggcatcagccactgtgcctggccttctcttttattttctaaatgttatttttaataatgctgttatattattattgttgtaaaaaaatccacactttaaaaagatgcttttcctctccctgtatctgaacagcaccatctcatcctaacagccacagacatcaggctcctgctgacagtgacaagatcagggccaccctgaatggcctcttttgcccacttcctcccctttgctgcacctggtgtgtgggccacctccagcgtggtcttctccactgaaggctgaacctgcctcccttgctcccacctcaacccaggcacttcttccccaataccttgtactaggtagtcggtggtctctctctccacctcagggctgagctgctgggttttctgaagatacttcaagacaaagacgttgggtgcaaagtggatcatgttctgctctccacagccaaacggcagccgcaggaggttgttgaggtggttcagggttggccccatgacgtcccctggtgggaaggagaagagagttgagttgggggctgtcccagttcagtagagaacagggacagctttacccagggatgggagacagtgagtgtcatgcagtcagccacccaactgccctttgggactggcaccctctgcctgctcagaccagctggtgtcctggctttggtgacagttttacacacctccttctgtgttctttagttttaactcaggctttctttctctagcttttcattctgttcaatgctttttccctccctggcttttaaaataggtgcattgaaagctatacattggcctctaagtacaactttggttgcatcctacaaatattggtatgtctatacaatcattctcattctattctagtctttctaaaatatttttttttttttgagatggagtctcactccatcacccaggctggagtatagtggcacaatctcggttcactgcaacctccgcttcccaggttcaagcaactctcctgcctcagcctcctgagtagctgggactacaggcgtgtgccaccacacccaactaattttttatttttatttttttagtagagacagggtttcatcatgttggccaggctggtcttgaactcctgacctcaggtgatccacctgcctctgcctcccaaagtgccggaattacaggcgtgatccactgcacctggtcctaaaatattctttctaaaatattcagattttctctttaaccaagagcacttcaatttttaaaaaaagtttctatatgtatggagttggaggtgcatttttcagttttctctctttaaaaaaaaattatggttctcccatccccttgacattccgtattcctcttcttggcttccttgtctcaaatatttctgatggacccccctgggacccccaatgtcccctgaacacaccttctttccttctttattttattttattttattttatttatttttagatggaatctcactctgtcaccaggctggactgcagtggcatgatcttggctcactgcaacctctgcctcccaggttcaagtgattctcctgcctcagcctcccaagtagctgggattacaggcttgtgccaccacgcccagctaatttttgtatttttagaagagacgagctttctccatgttggccaggatgatctccatctcttgatctcgttatccacctgcctcggcctcccaaagtgctgggattacaggcgtgagccaccacgcctggccccttctttctttctttagcctctctgcatgtctcactgaggctgccattgcccctacagctcttgttgcacaaatagcctggctactttctaggctctaggctccccagctttttctccatctgctgtgtcactgaaggcactggcacacagatcccagacgtcgcctcctctccattcctgcctctctgcttcttctcctatctcattcagttccatcttagtcactcagccccacatccactctgacttgctctcgtgcctcaggaattgtaaacttgaaattcctctgatctggccacaaccacctacctgcctgagtcccagggcctccaccctctgatgtcagagagagcctcgacaccctcatttgggtctgtccatctccttccggcctctcaccctctcctccctgactcaggcccatcccaaactctcaccacccttctgcccaactcctagccctggatcaatcacagcccctccagcacctgggctactagaggcatcctgatatggattggctgtgtccccaaccaaatcttgtcttgaattgtagctcccataattcccacatgttgtgggaaggactcggtgggagataactgaattatgggggcggcttccccatactgttctcgcagtagtgaataagtcttacgagatctgatggttttataaggcgaaaacccctttcacttggctctcattctctcattctccctgggaccatgtaagacgtacctgtcgccttccaccatgattgtgaggcctccccagccacgtgaaactgtgagtcaattaaacctctttttctttataaattacccagtcttgggtatgtctttatcagcagcatgaaaacagactaatacacatcccaaccctacagaccccctaaggctgcttccaatgtccctagtcagagcctctcacccctactcagcaactgctccggacgcctgccccatcaccaagaccccccaggcctccatcctgcaccgcatatctggctgacttattcaggtatttgtgttttcttggatcttgtccttggcccactgccctcacagggttcactgcaggttcttaggggtcaccctaccctgacctctgcataaggtttagacttggggggctctagatctgccatctcacctggactaggagtccctcaagggtggggttgggatcagctcttgggcttcctcaatgcccagcacatggatgggcatagagaaggcactggaagctgcttgtcaggtgagtgggtgtatgggtggacaccccaagacacaggtccccagcaaagcccagcttgagactaagcctggagtctcaacttcggctcttgccccctgacctctccaagccaggctgtgggacagacgcaccgatgatggaggcggtggctcgctcagacccagggatggcgccgtgtgggacccccagggtgaaggcctcgctgtagctctcgtccacctccatcttcctccagattcggaattcacccatggagccccagccggtggaaaagccaatgaactggacctctggtggcctcgggagggtccaggccacaatgacagactcattggatggctctggaccatggccaacctggaaaaagaaaccaaggctgctggacgctggcaggaagcaggcagtaggcactcaggtggcagtgacaccagctttgtggccagggtcagaggcctcagccatgctcacagtgcaaggaagggtcttcggggagtcagaggtgagagaaatcaggttaccccatccattaaacagccaacagaaacataaggcatggcatctacaggttccaaagtcattgggctccttggaacctctggacctttgcacatgctattgctctgcctagagaacctactctgcttccattttgcctagcgaactcctattcatacttcaaaacctactttggttatgttcttcctctaggaagcagtattagcttcctgtgttgggaagctgtgttagcttctatatcttctttttccttggcccagaaaacaccccccaacccccatttcacttgctcatgtccattcttcttttctcccctacctcctctctctgctccctgatccttgggtgcttcctctgccacagctcttgctacatgtttttttttttttttcggtaagcgactctagactaagaacaacttgaggtggtgctccatgtttcccttgctcctcctgaccctggatcaaagcctggcaccaaacaggaagcagctagtattggaggaacatgaggcttctgcacaagccccaggcagttctgctgtatacctggataaggccaccacgccagctgatccagaatgttctgaattcatcccaggagaggatcttggccgtgtgtgcactggccacgggctctcccatcttgctggtggagatccatgacctggtgttctgatgcccccccaggacgatctcgatcatgcctgctgtgtcctggggcccagaagacaaggccacacgggcatcattgtgagctcgcacagccacatcaaagcgggtgaggcgcagtggccgctgcacatactggaactcatacttgttgggggtggagatgtggactctctctggatggaggaaaggagatggggagttgagagggcacctggaggcatcccactttccctgatggtacctggaggtgagcaccaggaccacaaggagtgggtctcactgtgactcggcacacatggtggaatggtgttggcctaacaatggcattggcaatggcacacaaaagataaaatgggactgggcagagtagctgacacctgtaatcccagcactttaggaggctgaggcaggaagactacttgaggccaggagttcaagaccagcctgggcaacatagcaagactcttatctctacaaaaatgtttttaagttaacagtggcatgcatctgttgccccagctacttgggaggccaaggcaggaggatcgcttgagcccaggagttcaaggctgcagtgagccatgattgcaccattgcattccagcctgggtgactctctctctaaaaaacaagcaagattctctctctaaaaacaaaaagataagatgctcagggataaatctgaccaaagatgagcaaggtgttgaaaattgcaaaaggctgaagagagaaacaaaagaaaacccaaatcaacaaaagctagaccatgttcatggactatcatgaacattagagttcttccccagatggttctacagattcaaagcaatcccagtcaaaatcccaggaggctcttttggagaaattgctaactggattccaaaatttatacagacacgcaaaggacctaggagagctcaactttggtaaagaacccagcactctgggaggctgaggcaggtggaccacctgagatcaggagtttgagaccaacctgacccacatggtgaaactccgtctctactaaaaagacaaaaattagtcgggcgtgggggtaggtgcctgtaatcccggctactcaggaggctgaggtgggagaatcacttgaacccaggaggtggaggtttcagtgagctgagatcgtgccactgcactccagcatcggcgacaagagtgaaactccatctcaaaaaaaaaagaaaaaaaaaagaacacaactggaaaactcacactctctgacactgagacttaccataaagtgacaggaatcaccacaatgtgatatgagtatcaggaaacataaatgcaccaattattatgtggggagaggggctacttagaggcatctggtacttgcctccttgacgaacaaaaataacaagtagatcatcacactttgactagttcatctaagaacactggaattcaacagagaagtgacaagaaacacctaaagcgaagaaggaaatggaaataatacatggtgcttggcgggaatcagctgggggccgggagtagctccccagtgtgaggaaagggtgagtgaacccccgtggtccccattcccaccgtggactctagcagctctagccatgggagagcccctagatcctcgtgggccacagactagcctagggagatacccagagattgtgcaaagatactgttccagagagggggctaaggctgggtctcacacacccttgagccctaagcagctacagcagggcaccgtatcgagatcctagccactgccaggctgcattctgcctgggggccaaacagctcctgcatcttcacatctctggagccccacttacattccctgctcacagccaccaccaaggctggctgctgccaccaggaatgaagcccaagccattggcaatgacctcactgcccccagcagtgaagctgctgcacactttcacgtgccccgagggctaactccccaacctgcagcaactgccgctatgggatgctgcagccaggggccaaagcatgagcaaagctcatgctccccagccactgcatatggctgctgtcactggaagcaactgcaccctccccagtagcaaggctgaacccgagcattccaccagagacctaagaatcaccccacccctgcctaccatagccagcaactgcacacaccaccagggagcctgagataggtcggcccagcccagctctgtccccgcaagtgcctgagggtgccatccaagggccttgagactcccagcctagttcaccacagccggcacctgagcgctcctcctaggcatctgaggtcaggctcacccaacctaatgtgtgccactaacaccacagctggcacacacctgcctatgccacctgtgggcaaggaggttggcctacccagcctgtcacagccaccaccaacaccagagcagattgcttgggagccggagggtcatctcaccactgctactgccagtgcccatgccaagcccactgcccaggggctcaagaacctatccatgttcctggtccaccgctgccactactggcattcaagctagcttcctggaagtccaagagttggcccacctggacccactaacactggtaccagtgtagaatgccctggtgctcaaggaagtcatgctttgcccactgctgccaacactgggacctgaggacaggtccatctggcttccccatccccagcaaaacttcatcacagcctccactaataactgcaccctaagccactcaggaaatcacagacaccactgatgctgtttatagctaaagaaatcatatggagactacactactatacacattcagaatcaatctaaatgctgtacccaaccaacaccacagatagatcttcaggaaaaagtcttcctctatgaaagcaaattcaaaagattggaagaagcgactgttacaccaaacaccaaacgtatagacatcactgtaagaacacaagaaacgtgaaaaagcaaggaaacgtgacatcaccaaagaaacacaataattcttgagcaacagattccagtaaaaaaaaaaatgtatgtaattttggaaaaataattcaaaataatgacattagctgagtgtggtggctcacacctctaattccaatactttgagggtcaaggcaggtgaggccaggcattcaagaccagcctgggcaacatggcgaaaccccatctctaacaaaaatgcaaaaaattagccaggcgtggtggcatgtgcttgtagtcctagcttcttgggggtctgaggtgggaggatcacctgggcccaagaggtcaaggctgcagtgagccatgattgtgccactgcactccagcctgggcaacagagtgagatcctgtctcaagaaatagtaatggtaatgatataaaagaagctcagtgagacaaaagagaacacgtaagaaccatacaaagaagtcagaaaaacaattcaaaaaggaaccaaacaaattctgaaactgaagaattcattaaatgaaatacaaaataggaagcttcaataataaactagatgaagtagaagaaagaatttcagaacttgaagacagatcttttaaaataacccaatcagacaaaaataaagataaaagaaagaacaaagccaacatgacaaatgggacactataaagtaaccaaatactcaaaattttggtgtcccagaaagtgaagaaaaaacaaaaggggtagaaaacctatttaacaaaataatagctgaaaacttcccaagtctaataagagatttaggcatccagatacaggaagctcagacacctccaaatgggtataattcaaaaaggtcttctccacagcacattatggtcaaactgtcaaaagacaaaaatatcatttttttcttttactttttcttttcccttttttccagtgtggttggacaaaaagatagttctaaagacagcaagagagggcttggcacagtggctcacacctgtaatcccagcattttgggaggctgaggcaggaagatcacttgaggccaggagttcaagaccagcctgggcaacataatcttttcaataaatggtgctggcacagttggctatccaaatgcagaaacataaactttgatgcatatcttgcatggtaatccaaaattaactcaaaatgaatcatggccactttgtagtgtaaaacttaaaactacaaaattttgagaaaaaaaaaacagggtttagcaaagatttcttaaatatagcaaatgcattaatgaataaaaagaaaaaataataaattgcacttaattaatataaaaaaacttctgcttctcaaaagatataattaagagaatgaatgaaaaggtaagccacggtctgggagaaatatttttgcaaagcatttatctgataaagaacttgtatccagaatatattttcaaatctcaaaatgcaataaaaaaagtacaactcaattttgaacaggttaaaagattggaacagacgtttttccacaaaaaaaaagacatactcatagcaaacaggcaaatgaaaatatgcttaagatcatcagtcatgatggaaatgcaagctgaaaccacagggagatgtcactgggtatctattagaatggctaaaagtaaaaagactaacaatactaaatgttggtgaggatggggaggaaatggaactctcacatactgcaggtgggaatacaaaatggcctgagcactttagaaaacaggttggcagtttcttaaaaagttaaacatacacgaaccatatgattctgttctttcattcctagctattgacccaagagaaaggaaagcatgttacccagaaaagacacaaatgataatagtagctttatttgagatactcccaaactggaaacagcttgaaagttcatcaacagatgaatggatgaatacattgtgatatatccattcaatggaatcctactcagccttaaaatgattgaattattgacacatgcaccatggatgaatctcaaaattattatcctgaaagaaaccagacaaaaagaatacatacgacatgattccatttatataacattctggaaaatacaaactaatctacagagacagaaagcagctcagtggtccctagtgatggagtaaacaggagtgagagattacaaacgggcatgactcttgggaggtgaaggaaatgtttgttatcttagttgtgacaatggtttcacagacgtacatatatgttaaaactcaccaaattgcacatttaaaatgtgtgtaatttattgtatgtcaattatgcctcaataaacatatttaaaatattattgcctttactattcatataaatatgttcataaaagtgttaattacaatattaaaaagtagaagtactataagaaagtccagtaatatgttccaaaatgttccataacatgttctaaaatgctccataatggttaaattatggaacagttattatgaaacattctgaggctgtcttgaaatgctgttcataaagactttatactaaccagaaaaagtgctcagaatgtgttaagtgaaaaatgcagcatatataattacatagtgcgtgaagtaacaactatgttaaaacaaacaataatcaaccctatgaaagcaaatacaacaaaatgtcaaaggaagtcttctttgggtgtgaaccagaggagatgcttttccttctaccttcccaaatttctgcaatacacatgtattgcttttcattttacaatgttttaattgtggtaaaatatatataacataaaatgtaccatcttaaccatttttcagggtagagttcaatggcattaagtacactcaatgttgtgcaaccaccaccaccatcacccatttcaagaactcttttcatcctgtaaaactgtaactctgcacccattattacattaagcactcgctccctattccctcctcccccagcctcttgtaaacaccattctactttctttctctatgattttgactactctaagtgcctcatataagtggaatcatatggtatttgtacatatgtattgcttttaaaaatgtttttaacttaaagttttgctaagataatcacatgcaattgttataaataattcagagagctctctgtacccgtttccccctctccccatggtaacatcttgcaaaatcacaatcaggaatattgacattgataaaatccatcaatcttattcagctttctccaattctatttgtactttttatgtgagtgccatgtaattttatcacatatgtaggtacacgaatccactaccacagtcaaggtactaaacattcccaacaccacagagattctcaccgttgcccatttataaccatatccatcccctacttccttctccctctccctaacccctggcaaccactaatatgacctccatttataaaattttgtcatttcaaaaatataaatggaataattcatgtatcttttgggattttcttcccactcaattcccttcattcaagattcatccaagttgttttatgtatcaatagtttgtcctttttattaatgagtagtattccaaggcttgaatgcacagtttgttaagtcattcacctgctgaaggacatccgggctgtttccagtttggggctactacaaataaagctaatatgaacatctatgtacaagtttttgtgtgaacataagtctttgtttctctgagatcaatactcaggagtacaactactgagtggtggggtagttgcatgctcagttttttaagaaaccaccaaactgtttttaaaaactaccaaaggtggctgtaccattttacatttccaccagcaaagtttgagtggtccactttctccacatctttgccatcatttagtgttcactatttttttttttttttgagatagcaactcactctgtcgcctaggctggagtgtggtggtgccatcacagttcactgccacctcagcctctcagggtcaagcaatcctccctcctcagcctcccaagtagctaggactacaggcacaagccaccatgcccagctaatattttgtatttttgtagagacagggtctcatcatgttggccaggctggtcttgaactcctggactcaagttctccacccaccttggcctctcaaagtgctgggattataggcatgagccactgcgcccagctctatttttaatcttagccattcttataggtggtgtgtaggggtatgtcattatgctgtaatttgcatttccctaatgataaatgatgttgagcatctttttatgtgcaatttgccatctgtatgtctcctctggtgaaatgtctggttatttcttttgcccacttttttgtttgtttgtttgttgttgttgttgagatggagtctcattctgtcacccaggctggagtgcagtggcgcaatcttggctcactgcaacctctgcctcccaggttcaagctattctcatgcctcagcctcctaagtagctgggaccacaggcacctgccaccatgcctggctaatttttttttgtattttttgtagagatggagtttcaccgtgctggtcaggctggtctcgaactcttgacctcaagtgatccacctgcctcggcctcccaaagtgctgggattacaggtgtgagccaccacagtcggccttgcccacttttaattagatggtttgttttattcactactgaattggagacttcattatatattctaaaaaccagtaatttgataaggtttgcaaatgtattttctcccagtctgtagactgtagttcctcccttaacagggtttattgtggagaaaaaaacttttaaagtttgaagaggtttatttattaatgtttccttttatagattgtacttttcaagtctaaaaactatatgcttggctctaggtggcagatctttttttccctcttttctttctccttccttccttccttccttttttccttcctttccttcccttcctctttcctttctcccttccttccttccctcctgccttccttccttccttccttccttcctccttccttcctttcttccttccctccctccatccctccctcccttccttacttcatttttttgagacagggtttctctctgtcaaccaggctggagtgtagtggtacaataaaggctcactacaacctccacctcctgggctcaagcaatcctcccacctccacctcccaagtagctgggactacaggcgtgcaccaccacgtctggctaagtttttgtttgcttgtttgcttgtttgtttaattttttgtagagatgggatttcaccatgttgcccaggctgtcctgtgtttttttctaaaagcactatggttttacgtttaagtccatgatccatttagggttcattctcgtgtaaggtgtgatctttaggtccagcctcatgtgttgttgttgttgttttgagacggagtctcactctgtcacccaggctggagtgctgtgatgcaaacttggctcactgcaacctccacctcttgggttcaagagattctgctgtctcaacctcccaagtagctgggattacaggcacacacaaccacacctggctaacttcatacttttttttttttttttttttgagttggagtctcgctctgtcacccaggctggagtgcaatggcgtgatctcggctcactgcaacctccgcctccccggttcaagtgattctcctgcctcagcctcctgagcagctgggattacaggtgcgtgccaccacgaccagctaattttttgtatttttagtagagatggggtttcaccatgttggtcaggcttggtctcaaactcctaaccttgtgatccacccgcctcggcctcccagagtgctgggattataggcgtgagcctaccgcgcccggccaactttgtacttttagtattgataagtttcaccacgttggccaggctggtctcaaactcctgacttcaaatgatccaccttcctcaggatcccaaagtgctgggattacaggtgtgagccaccgtgcccgggcagcctaaccttcttgcttggtgcctgcagtgcacattcctgtgtattcattccctgcgtattccctgtgtattcattccctgagtattcattccctgtgtattcattcattcatgccccaccctcactggctctgcctgtccccagctgggacatcgttcttcctaaaccacagtgcccccttcccaggggaagggcaggtgctcactttgcagcgggacagcccccacagtgtgggaaagggggaaggccaaagtcctgacccagccaggtggccacaccttagcagaatgggcacgggggactcaccactgggacagaagaatgcgctgtaggtgtacgcccgggggactccttccgcctgaaacaaagaaacaaggagaactgagtgctggggcggtgagggggatggtcagctcagcggagcagctggctctcccacagcaatgacttcaagtccagaccacataattgtgcttccaggttttacgtggtatcagcacggtcacaccaagatcacaggtgcgtggagcaggacagggccacccacttcccaggctccaatggggaaactgaggctgctcccccttgctggccaaaaggaactcaccaactgcttctaaacttgtcatggggcccacatccctaccctaccctcccagccaccctcttcctcccatctccctctgggcagaggacatcatgaggacaaataagccaggttctgaggcctcatttgacatccgtgagcactgtgagaggggctcctgcatctgccaaggacgagtctccgtcccactgtctgtctaccacatctcttgtctcctgtctcttccatctgggttctcatttctgcttcttctatggatgaccccaaataccagaaggcagctgtctcagtctcttaaaaagggatgcccagaatttaaccccctataccttgcggagcttggtctgaccaacacggcccctgtgggggcccttggatcagacctcaaagggttaacatggggcagctgcaaccagaaggcctggcagcccctttccccattaggatggtcaattttatttatttatttatttatttatttatttatttatttatctatctatctatgtatctatctatctatctatggacagagtctcactctgtcgcccaggctggagtgcagtggtgtgagtgatctcagctcattgaaacttctgcctcctgggtttaagcaagtctcatgcctcagcctcccaagtagctgggactacaggcacatgccaccacgccaagctaattttttatatttttagtggagatgggattttgccatgttggccaggctagtctcaagctcctgacctcaagcgatccgcctgcctcggcctccgaaagtgctgggattacaggcatgagacaccgtgcccagcctaggatggtcaattttaggtgtcaactggactgggctccaggatgcccaggtagctggttaaacactctatctgggcgcgtccaggaagtgcttctgcaagagatcagcattggtgttggaggactgagtagggcacacggccctctccaatgtgagtgggcaccatccaagctgttaaacgtctcctgatagaacaagacagaggaagattggttccactctctgcccaactgcttgagctgggacattgatcttctcctgctcctggttcccaggccttcagacctgggctggaatctacaccattggttctccagctctcaggccttccagctacaccactggctttactgggtctttagcttttttgttgttgttgttgttgttttgggttttttttgtttttgtttttgtttttttttagatggagtctcactctgttgcccaggctggagtgcaatggcgcgatctcggttcactacaacctccgcctcctgagttcaaatgatcttcctgcctcagcctcctgagtagcagggattacaggcaccaccaccaggcccagctaatttttgtacttttagtagagacagggtttcactatgttggccaggctagtctcgaactcctgacctcaggtgatctgcctgcctcagcctcccaaagtgctaggattacaggcgtgagccaccacgcccggcctcctgggtctctatcttgcagagggcagcttgtaaacttctcggcttccataagcgcatgagccagtaccttatgataaacctatcctacagatgtatgtgtgggagtgtgtttatataacaaatctcattctatgtatgtagggggtgcggatttctgtttctctggtgaatcctaatacaaccattcctgctgactggcttagggccactcactcaacctctctgggcccccatttcttcatctctaagatgggggttaaagacccccaacttcaccttgtgacggggttatcatgcttcagaaagggtctggagtcttctcagtgctactgacagtcagttcttgttatattttctcatccttacctactttcattacaaagctctccttgaaattgtcatgtgtctatactgatgagtccaggagatgcttgtccccactcacatccacttcctagtaaagttcccagggttggtgctgagaggctgaggacaccatctcaggctacatcgagccgtccacctgccaggatttcatctcacacctgctaggcccgatgtggcacccacgggtcatttgctaagctagggggcaccagggaaggccccagaagcattgcttaggcctcagtaaccccccatctacctgcctggccccttgtcgggaaagggatttggagcaatgggcagggctaggccattgtaacccacggtagttttttgttttttgtttttgagatggaatctcgctctgtcgcccaggctggagtccagtggcgcagtctcagctcactgcaacctctgcctcccaggttcaagcaattctcctgtctcagcctcccaagtagctgggattacaggtgcctgccaccacacctggctaattttttgtatagtttagtagagacggggtttcaccatgttggccaggctggtctcgaactcctggcctcaggtgatccacctgccttggcctcccaaagtgctgggattacaggcatgagccactgtgcctggcctcatggtagctttttaacagctacataatcctaaaaattgtgcataacctaaatgtccaccataggtgaacagataaagaaaatgtggttcatccatccagtggaatatgattgagccatagaagcaagcacgtatctatgctgcaccgtggatgaaccctgaacacattgtgctgagtgagagaagccagactcaaaaggccacatgttgtatgattccattgatacaaaatgtcccgtgggcaaatccatagagacagaaccagatccattctgttggtggtgagtgatatggtttggatttgtgttcccacccaaatctcatgttgaattgtaatcctcaatgttggaagaggggcctggtggaaggtgattggatcatgggggcggatttcccccttgctgttctcgtgataatgggtgagttctcatgagatctggttgtttgaaactgtgaagcggctgggcacggtggctcacgcctgtaatcccagcactttgggaggccgaggtgagtggatcacgaggtcaagagattgagaccagcctggccaacatggtgaaaccctgcctctactaaaaatataaaaattatccgggcatggtggcaggtgcctgcaatcccagctattcgggaggctgaggcaggagactcgcttgaacaaggaggctggaggttgcaatgagctgagatcatgccattgcactccagcgtggcgacagagcgagactccatctcaaaacaacaacaagaacaacaacaacaaaactgtgaagcacctccccttccctcctcctcctgctccagccatgtaagacacgcctgcttctccttcacctcctgccatgattgtaagtttcctgaggcctccccagccatgcttcctgtacagcctacagagctgtgagccaattaaacctcttttctttactaattatccagtcatggtcgggcacagtggctcatgcctgtaatcccagcactttgggagaccgaggcgggcgggtcacctgaggtcaggcgttcaagaccaacctggccaacatggtgaaaccccgtctctactaaaaatacaaaaattagccaggtgtggtggtgcatgcctgtagtccccgctactcaggaggctgagaaagaagaatcactggaacctgggaggtggaggttgcagtgagctgagattgcaccactgcactccagcctgggcgacagagtgagactccatccccaaaactagtaataatataaataaactaataaataaataacccagtctcaggtatttctttatagcaatgtaagaacgaactaatacaacaaggatgcactgtgcctctggctgaccattggctggggccctgggcacaaatccaggggcccctcatggtttctgggtcccaagaaacctctgctgactcagctcacagaggaccccacagctggcttcctcaatgatgcccatctcttccactctgcccctctgccgtggcttgggtttgctccttgagtgttagcccatctcgggctgcacttgtccatcctggttccaacctcctttgtctctgtgctctttctggcttggggccagatctcagaacacggagcctgcatgatgcacgaatagtagctccggctgggcatttctaaagccttgtagtacagatctgtgcttcactcctttcggcctctctggatttgcctgttctgggcatttcatataaattgaatcatacaccatgtggccttttgtgtttgacttttttcttttttcttttttcttttttttttttttgagacagggtctggctctctcacccaggctagagtgcagtgttgcaagagtccctctgttgcttactgtaactctcacctcctggactcaagcaatcctccctcctcagcctcctgaggagctgggactacaggtgtgtgccaccacgcccagctaatttttgtatttttagtagggacagggttttgccatgttgcccaggctggtctcaaactcttgacttcaggtggtctgcccaccttggcctcccaaagtgctgggactataggcgtgagccaccgtgcccggcctgtgtctgtcttctttcactcggtatcacgttttctaggtttatccacgttgtagcatggatcagtgctttatttatttatttatttattcattcattcattcatttagacagggtctggctctgttttccaggctgagtatagtggcataatcatagctcactgcagcctccaacttctggcctcaagccatcctcctgcctcagcctcccaaagcacaaggattacaggtgtgagccaccacacccagcccttcactccatttcacagctgaataatattccattgcattgaggaattgcatttcattgacccacattcatttctctaattcatcagctgatggacatttcctaaaatagaaagtgtatccctgactttggtttgggattccccagttgactgttataaatgcctgtgtgacaacagcacgtgggtctttagtagacaggccagataccatgagaggctttccaccaacactctcatttaaccatccaacgcttccatccgaatctggggctctcactccagagcccactccctggctggccagccctcctatcactccagtgaggcccgaattatttctgcctcctctttgctccttggaatttcactgaagtgaaattcacgtggagatgattgaacactctcagcctcccagcagatatagaggatcttagtccccttgcaggccagcaggggagcaaggcagagcggtgtccgtactccctgcacctgccaagccatccccaccctggtacagtgcccatgatgggccgtgcacagatgatgattccccaccggcccatgcatcgtattcagcttcctgctcctaagtccatctcagctggtggcgcccacagtcctccggtgggaagaggtaggaggagcattttgctgctttatcaagccacacatcctggtgcctcttgtttcataaattgcttttctaattgtagcttcatcttttgcatcaacatttcaagtcttctgatgcctgtatctttccccagagctgcctccaggaagccggacaagtggatactgcaggtgcagagacagttctgcggcatggatgggaggaaaggctccagggaaggagaccctcaagagtccccctgtgtgcattgagaaatcccttctgtaaggggaggaggcaagaacgccaggcctccaggttctgcagctcggaggggctcgctgcctccttcttgggccttaggagggcaggctgtggcccagggaggatgccctggctgggcaaagggtgactgggggtctctgcatttccccatctggaccctcccaccctgctggctcacagagatctcggtccccacctgacagcactcttgtccccaaggaatccatcacatcacatcaacgacactacagcggtgacctgtccactgtcaccgctccggagttctgcccagtgggcacatgactcctggtgctgacagaagccacttgtgttcagggccagcaggatcccagcagggagggagagcagctgtttgcagctgggcctctggggaatgtgagtcccttcgggctgctgttaggggctgttggtgcggcaccaaatggagcctcagtagggctctgatgtgtccaagcagccaagaaaagatgaggcatggtggctgctgcatgctcagccctgagacatctgtgtgtcatctctggcttcccaccccatcttatgaaggtgagcccctcgtcttacagagcggggctggaaagccaggatgcttcccgagatcatgggtaagtggccaatcctggattcatagctgggggtctgcaagatcctggcgcctgcctctgccccctgcagctctgtgtccttcctacacaggccatccaatgacaatgccccaaatgctgagtcatggtccccataaatgcctatgacaagcacgagatgagggacatggtcttcctaaatagttcacccaggggtcagggagcacttgctgcagcccctgaagagtcccaagctgctttaccgaagcccactctgcgctttagggagggaacggactaccatgatcctctaacaaggaagtacccgaaagtccaggcacctgagctctcaagcacaacccgtgaaggctgcccaggccctggctcagcctcagaccacacactccagctgggcccagcttcatggctgaaggaatgaggccctggctaagcaccagagatgaggacacggccttacctcaaccatcacactgcgcctgacgtgatccaccccgatggggaccctcctgtcggcgtgattctcctcagggtgtttgctggacctcccatcccggcagcaatttgtgtctccgtaagcaagggctttggctgcagaaatttgatgtcttggtctcagaacaggtctccacccaagatgggggctgtcccatccctatccttatcccagatgtgtgtgcatgcatgcatgtgtgtgtgtgtgcatgtgtgtgtgtatatgcagatgtgtgcatgcatgcaagtgtgtatgtctgcacatgtatgcatgtgtttgaatgtacaggctcatgtgtgcatatgcatgcacttgtacatgtgtttgtgtgtacgagtttgtgcatatgcacgtgtgtgcatttgtgtgcacgagtttgtgtgtgcatttgtgtgtgtacaaatatgtgtgtgcatatgcatgtgtgtatctgtacgtgtgtttgtgtgtatatgcatgtgtgtgcatttttccatgtttgtgtgtacaagtttgtatgtgtatatgcatgtgtgtatgtgtgtgcatgtgtttgtacaggttcgtgtgtgcaatgcatatctgcacatgtgggcatgtgtgtgtgtatgatttgtgtgtgtgtgtgcatgtctgcatgtgcaggcatgtgtctgtgtgtgtggatttgtgtgtgatgcatgtctacacatgtgggcatgtgtgtgtgtggattcgtgtgtgtgatgcatgtctacacatgcaggcatgtgcgtgtgtggatttgtttgtatatgtatgtatgtctacacgtgggggtgtgtgtgtgtggatttgtgtgtgtgtatatgcatgtctacacatgtgggcatgtgtgtggatttgtgtgtgtgaatgcatgtctacacatgtgggcatgtgtgtggatctgtgtgtatgcatgtctacacatgtgggcatgtgtgtgtggatttgtgtgtgtgtgtgaatgcatgtctacacatgtgggcgtgtgtgtggatttgtgtgtgtgtatatgcacgtctacacgtgggcgtgtgtgtgtggatttgtggtgtgtgtatgcatgtctacacatggggacatgtgtgtggatttgtgtgtgtgtatatgcatgtctacacgtgggtgtgtgtgtggatttgtggtgtgtgtatgcatgtctacacatgtggacgtgtgtgtgtggatttgtgtgtgtgcatgtctacacatgtgggcgtgtgtgtggatttgtgtgtgtatgcatgtctgcatgtgtgtgtgctacactgggttggcaccttaagagcccagctcccccaacaggtgagaccccagggcttgcctccccactcctcctgggcccattccttctgtcctgcttgccccagttgctgtcccattttccttgggacagtcctgaccttacctgctgccccatccacccctcatccccaactcgggtcaatgccaggacacttttgtggcctggagaggggggacaccccaagaactgtggggtcctcacccgtgatgttgttgagtcccaggtcgctgaaggacagaacgacccagatgggctcagcctccccgggggccacacacatcttcttggtcacatggcgtttgccaggatgcccaacaaactggatgcccttgggaaccgagagcttcatgtacacctgcagagggtggcattggctcatggcgcctggaatccagaccccctcccagtgcctggaggcccaacacacatcccaccactcactgcacacaccagacttgtcagcctcccaaagagccatgctccccccgggaaggtcccctttccatttccgatcagaacaaactaccctctgctgtctggtgccccacttggccttctcatgcccatctgtcttgctgtgagacctctcctccccacagccctccgtatcctcacaggtccagatctcccatggactgaagctgccagttccagccagggctgcctctcctgcatgtccatccactccgggactccagatggatgtaacctctcccacagcaggtccacagagtgcctctcctgaccctctttccaaccgtgcagctccatgatgtcagagtacagctctgtgtgtgcacgtgtgtgtttattcatgtgcatgtgtgtgctgtgaatgcatgtgtcccctgggtgcacacttgtgtgcatggatgcaagcacagactgcatacacatgtgcatgcatgcatgtacacacatgtgcatctaccgggtgaaggcatgtggatatgcattcgtgtgtgtgtgtatgggcatgctagtttctgcatgcatgtgtgtgcctatatgggtacagaggtgctatggatgcacccatgggactccatgtgcatgtctgtgcatggatgtgcaagtatggcatgtgtatacatgtatcatgcatgtacatgtgcatatgtataccatgatgacttgtgtgggtgcatcatgtgcatgctcacacatactggtctctgtgtgcatgtgtgtgcattttgcagggtgtgtgcatgtgcattgtgggtgcatatgcaagcacgtttgcaacccctccatctaagaggaaatctttgctccacatccatttgtccaaccagcatatatggagcacctactgggtgccccgctaggaattaaagaaatggctgatcaagacatgagtgattgctgagcctcagaatgttgtcccacccaaggactggcacagaggctgcaggtgtgatgtggagagaagcatgcggggaaaatgtgaagtggcatacatgatagagtcctgaatcctgacaaaggaaaggcccagctagatctgagagccaatggctgctgcagggtgcacatcaggaatccccacatccccctcaaggtagcattttcccaggaagaaagaaagaggctgggtgcggtggctcacacctgtaatcccagcactttgggaggctgaggcaggcagatcacctgaggtcaggagtttgacaccagcttggccaacatgaggaaaccccatctctactaaagaccaggcgtagtgctgggcacctgtaatcccagctactcaggaggctgaggcagaggaatccttgaacctaggaggtggaggttgcagtaagccaagatcacaccactgcactccagcctgggcaacagagcgagactccatcaaaagaagaagaaaaggaaagaaggggtaaggaggagaaaagacgggaaaggaggggaagggaggggaagagaggggaagagaggggaagggaagggaagggaggagaagggaagagaagggaagggagggaaaggaaagggaagggaagggaagggaagggaagggaagggaagggaagggaaaggaaggggagtggaggggagaggagcagaggggggaggggagggggaggggaagggaagggagaaagaaaagaaagaaagagagagaaaagaaaagaaagaaagaaaagaaagaaagaaggaaggaaggacgggagggggggagggagggaggaaggaagggaggaaggaaggagaaagaaagaaactcaacagtgtcaatgagccattttccaggtcctgagtgaaatgaccagcgctccccactggagggtctgaatgggtatgttttctctgtcttggggatggtcatacaagctggggtggtccttaagcacatacactgcccagcaggacttccttcttcctgctggaaaagctagacaccagcatgcgctcagagccaagccggacatctggggattctgctcacaggtttcagagggaaacctccctttaggggccaacctacaggtcagggcatagtctgtgtgtatgctttcttttggaaaccgagatcctattcctcccaaccataatccatataaaaagaacggtaaaggatggattgtaaaggttgggactgaagctaggattctgggcaccactacctggccattctgagtctaacatctcccatttactcctcaccgaagccaccctgtgaccgctgccttggttgcttcctgcctccttgcctcttgcctagacaatggcaggagcctctgacctcctcgtcctcttgctcctcacctgcttttccatcttccctgaccagaccccaaagccaagccaaactatgtctgaggcaggacccaggaaaggtcaagctgcctcctgcttctgttgcttgtacatgctgttccctctttgcgaatgcccttcccgccccgatgcctgactcaaacatcacctgcagactctcaggttcagggggacttccccttttctgggctgtcccggcacccgtagacattgattctaacacacagctccaccactcactccctggaggcccctgaacccatgacaatgcttctttgagcttcctaatggtgaatgattccatcacagacccttcttccttggcccacacaggagcttgataaaatgatgaaggtggccaggcgtggtggctcatgcctgtaatcccagcattttgggaggccacggcaggcagatggcttaaggtcaggagttcgagaccagcctggccaacatagtgaaaccccgtctctactaaaaatacaaaaattagctaggcgtggtggcgggcgcctgtaatcccagctactcaggaggctgaggcaggagaatcgcttgaacccgggaggcggaggttgcagtgagccaagatcacgccactgcactccagcctgggtgacagagcgagatcctatctcaaataaataaataaataaataaataataatgcaggtaaaattgtcagtccagcaccagctgcagaagtacatgccccaccaaaactgagtgagtgggatctaaacacaaaccacttcgctccaaggttgagcttggatctcacatcctgcatgacgggatcttctgatactggcacaagccaccagaagccaagagacagggagagaggggccaaatgcagtggctcatgcctgtaatcccagcactctggcaggccgaagtgggagggtcacttgaggccaggagttcaagaccagcctgagcaacatatggagatgccatctctacgaaaataaaataaaataattagccaggcatggtggtgcacacctgtagtcccatctacttgagaggctgaggaggggggattgcttgagcccaggaggtcaaggctgcagtgagctgtgattgtaccagtgcgctccagcctgggtgatagagtaagaccctgtctcgaaaaaaaaaaaaaaaaaaaaaagagaaagagagagaaagaaaggcatagacagattctccctcagggcctccaaaagggaccagccctgatgacaccttgccttcacacttcttctcgtgaactgtgggacaatacatttctgttgttttaagccacctggtttgggctaccttactagcccaaggagactaggacagcagcctttcctgccgcctccaagagagagctttggccttcactgcacacctctggcagacactggaaccccaataatatcatcgaaaaacagccctgcttaatgttctcagtgtctactgagactaactcatttaaccctttaacgcccagcgaggctccgacacaccaacagattgaataacgtgcccaagatcagcagctctatgagtataaaccgggatcccaagcaccctctctgttcaccaccaggatttcctggtactttgtggggagcctgtgaattaagacccataggccaaaccggatccaccacctgtcttttgggcccacaagctaaagatggttttcatctttttcaaatggttaggaggaaaaaaaattaaaagaagaatgattattttgtgacaggtgaaaattctatggagttcggatttcagtgtctagaaatcaagttttattggaacacagccatatctattcaggtaagagatcatctaggttgcttttatgctataagggctgagttgagtcgctgccacagggattgtgtggctggcaaagacagaaatatttcctatctggccctttacagagaaagctccatgctatcatatatgataccagtccaggcacgcccttgctaggccagggagtcagggacaacagctccacttacaccaagtccctctcactcacacacatgcgtccccacctcctcctcacccggctttgacggttggtgaatcagaggctgatctcatcccactcctgcctccctgacagcacagatgacgcatcctccccaaagccccccaggctgagcccacccatccctgcctcctcaacatcatagaggctctcgccctcctaaatcccccaagctgacactgtcccacccctgcctaccttatagcaccaatgcagtcccaactccccactgaatggaggaaggctatgtatttggggggctgagtacctcagcgcaggtgcccatgtagttgtagacactgagcgggatcttgacctgctccccacggatgatgagagcggggagcatgaagtccacgaagaagggcttgaaggtcttcagcagggagggctcggcgatgcctaagccctgagaggtggacagggccacggcctcacccacccagctggtgatggagtccgggaccttcacactgagtgtcccctcaccagatgggtcactgcggagagacagacagccatgatggggggcccttctccagggccatgcctcaggggggccagtgggcatggatgacccaggctgcatggctcagagaggcaccctaggagcttagaaacaagcattgaaggcatcacaaaagcggcaacaggaaaaaaactgtccctcagccctgactctaatagaaaacatgggctgggcgcagtggctcatgcctgtaataccagcactctgagaggccgaggtgggagactgcccgagcccaggagttccggaccaccctaggcaagatgatgagaccgtgttgctacaaaaaatttaaaaattaggtgggtatagtgacacatgcctgtaggcccagctactcaggaggctgaagtgggggattcacttgagcccaggtggtcgagggtgcagtgagctgtgatcccgccactgcagtccagcctcagcaacagagtgagatccctgtcacacacacacaaaaatattattgaaagaaactaaaaaagacaaaaaaagacataaataaatgaaaacatttcccatgttcatggatcggaaagacttgttaaaatgtcaaaactacccaaagtgatctatagattcaatggaacccctatcataaaccccaatgactttttattttattttattttgcagaaatagaaaactccaccttgagattttacatggatctcaagggatcctggtggccaaacaaagaaaccagaagaataaagctggagagctcacacttcaaaacttaccacaaagctaccatattcaaatcaatgtgttactggcataaagacagacatacagaccaatggaatcaaatagagagcccaggaataaaccttgacgacacagataaatgatttttgacaagggcatcaagatactttagggaaaagacaatctttttaacaaatactgctagaaaaagcaaacatccatatgcaaaagaatgaatttggaccttacctaacaccatatacaaaagttaactcaaaatgaatccatgacttgaaagtaaaaactaaaactataaaactcttagaagaaaacagggcaaaagcttcatgacattgggtttgacaatgatttcatggatatgaaaacaaaggtacaagcaaaaaaaaaaaaaaaagagtagacaagttggactttatgaaaactgcaaaattttgagcatcaaaagacactattcaagggctggcatggtagcttactcctgtaatcccagcactttgggaggccaaggaaggaggatcacttgagcccaggagtttgagaccagcctgagcaacacagcaagaccctatctttacaaaaaattaaaaaatttagccaggagtggtggtgtgtacctgtagacccagctacttgggaggctgaggttgggggatcacttgaacacctgggtgacagagtgagaccttgtctcaaaaaaaaaaaaaaaaaaggcactatcaacagagtaaaaagtcaacccagtgggagaaaatatttgcaagtcatatatctgataaggaaataatatccagaatatatagagaactcctgaaactcaataacaaaaacagcaacatgattcaaaaatgggcaaattacttgaatagacatttcaccaaagaagatagacaaatgactgataaatacatgaaagatgctcaacatcactaatcattagggaaatgcaaataaaaaccacaatgagatgccacttcatgtacttaattaggatattaaaaaagaaaaggcaagaaaaaaggctgggcatggtggctcacacctataatcccagcactttgggaggccgaggtgggtggatcacttgaggtcaggagtctggccattgtgaataacgctgtgaacatgggtatacaaatatccctttgagaccctgcttcccattcttttgggtatacacccagaagtagtgggtgaaaccccgtctctactaaaaatacgaaaattagccaggtgtggtggtgcgtgtctgtagttccagctatttgggaggctgaggcaggagaattgtgtgaacctgggaggcggagggtgcagtgagctgagattgcaccactgcactcctgcctgggtgacagagcgagactctatctcaaaaaaaaaaaaaaagaaaagaaagaaaaagagaacagcaagtgtttctgaggatgtggtaagattggaaccctggtacactgttagtagaaatgtaaaacgctgcagctgctgtggaaattagtctggaggttccttaaaaaattaaacataaaattaccacatgattcagcaattctacttctgggtatacacccaaaagaatgggaagcagggtctcaaagggatatttgtatacccctgttcacagcattattcacaatagccaaaaggtggaagcaactcaagggtccatcgacagaaaataaatggataaacaaaatgagggaatccatgcaataggatattattcaaccttaaaagggaaggaggctgggtacagtggctcacgcctgtaatcccagcactttgggaggccgaggggggtggatcacgaggtcaggaaatcgagatcatcctggtcaacatggtgaaaccccatctctactaaaatacaaaaaattagctaggcattggctgggcacggtggctcatgcctgcaatcccagcactttgggaggccgaggcgggcggatcacgaggtcaggagatcgataccatcctgggtaacacggtgaaaccccgtctctactaaaaatacaaaaaattagcagggcatggtggtgggcggctgtggtcccagctactcaggaggctgaggcaggagaatggcgtgaacccaggaggcagagtttgcagtgagccgagatcgcaccactgcactccagcctgggcaacagagcaagatgctgtctcacacacaaacacacaaaaatagctgggcatggtggcgcatgcctatagtcccagctatttggaaggttaaggcagaggaatcacttgaaccctggaggcagaggttgcagtgagccgagattgtgccactgcactccagcctggtgacagagcaagactccatctcaagaaaaaaaaaaaaaagagagaaggaaattctgacatggattctccaacaaagatgaaccttggggacatgttgaaataagccagtcacaaaacgacaaatactacatgattccacttacaggcggtccctagaatagtcaaactcagagacagaaagggttgttaccaaaggctgggggaagggaagagaggggagtgagtgtttaatgggacagagtgtcagttttgtaagatgaaaggagtcacagaaatgggtgatggtgatgttggcacaataacgtgagtgtccttaataccactgaactatacacttaaaaatggttaagatcgtaaattttatgtggagtatttcaccataattttttaaaccaattcatttttgaatcattttccctttttgagacagggtctcactctgtagcccaggctggagtgcagtggtgtaatttcgtgtcactgcagcctcaacctcctgggctcaagcgatcctcccacttcagcttcccaagtagctaggaccacaagcatgtgccaccacacctggctaatttaaaaattttttttagagatggggccttgctatgttgcccaggctggtcttgaactcctgggctcaagcaatcctcctgcctcagcctctcaaagtgctgggattacaggcataagccaccacaccccgcctttaaacgggtgtggtttaaaagagagttgaccagtcctcttttgggtccagcaggaacctcctccctggtctcagatctgtcccctctgattcatccttgctccagccaacaagagaggagagagaacatcccgaatcctaaatcccaaatccctggctctccacacctgcacccctaaccccacccccacagcccacatggtctcatactccctgcatcctcctcagctccttccatctcatttcaaccatgtggaaatccaccagcctctcctactttgcagcacttgctcatgctggtccttcctggacacccttccctttcttgcttattcatatggtgggactcagcttgggccctacattgaggaccctctctggcttttccaaaggattccaccatctttctctgcctcccaagctccatgcccagccttccagaagactaaccccactgcaccatgatggctctttaggcacctgtctactctagctacaatgaaaatgttatgagtgctgggactctgtctaccttattcaagggaccatccttaacatcaaaaacatccgggccaggagcagtagctcacacctgtaattctaacacgttgagaggccaagacaggaagatcacttgaggccaggagtttcagaccagcctgggcaacatacagagaccccatctctatgaaatatttttttttttttgagacggagtcttgctctgtcacccaggctggagagcagtggcgccatcttggctcactgcaacctccgtctcccaggttcatgccactctcttacctcagcctcccgagtagctgggactacaggcgcccgccaccatgcccagctattttttgcgtttttagtagagacagggtttcaccatgttagagagggtggtctcgatctcctgatctcgtgatccacctgcctcagcctcccaaagtgctgggattacaggcatgagctaccatgcccagccctaataaaagttaattgaaaaaattttttaacaataaaaaaagctcaccagacatccagaaagtagatacatttgaatgatgatggacagatagcctgtcttacagctgggcccccagaacaaaacacagtgaactggatgtgttctgatcagcagtcaaaccttcccacgatgaggacatacacatcccccaaagcagtctgaggggcccccagctgcgtgcctggctctgccaagcacttgccacagcaccttgtgcctggaggaagggcacagctccagcagtcagcccacctgctggcccgggctggaccaagagtcagttttcatgccaaactggtttgccggggcacgccagtgccactttttactagtgtcattggtgctctaacgctgagcattgcaagaaaaaaagtcaattgcatccagcagaaaagggttgcctacactcctgcttcaaagagaactaaacggggaaaaatgcagaaaggaaatgtgttgagaaaggcatcctgttttttgagcaagagctgtagtcccctgaggagcaaggagtgggggtaggtggagtcaagttcatgttccagggaactgtaatcattttaatgagctcgttatacaaacagagcagatagagtaaccccaagagggagttataagaggcacaaagcccttgcatttcatatttcacaggcaaacgtccaaatgtgcagcgggactcaaggctggcttcatggcttgaagttttgtgtgttagaaaaagatgcacagtgtcttgctcagatgttggtatcaggcctgcccatctcaccggaggctctctggacccgcatgagtgtctttcactcaaccggcaaagtcagcgcagaaaagaaatcttaatgtacctgatgttgagacaatgccaaatccatgtttcggggaagaaagtcctttttctcttctctgttctatgaaaagaaaaaaagaaacgattaaggtttcatgaacataacaaatcttatgtgaacctagcagctttgcattctatttgatcagatataacgcgttaatttcttttacctggaagggttaacattgtacttcactgggatataacatgttaattctcttacctggcagggttaacagtctacttgattaggacataacttgtttttttaaaaactttattttaggttcagaagtacatgtgcaggtctgttacataggtaaatgtgtgtcatgggggtttgttgtacagattatttcatcacccagatactaagcctatgcccaatagttattatttctgatcctctctgtcttcccatcccccatcctcaagtagacctgtgtctgttcccccttttgtttccatgtgttctcatcatttagcttccacttataagtgagaacatgcagtatttggttttctgttcctgcattagtttgctaaggataatgggctccagctccatccatgtttccacaaaagacatgattttgttcttttttatggctgcatagtattccatggtatttctgtaccacattttatttatccaatctgtcattgatgagcatttaggttgattccaggtctttgctattgtaaatagtgctgcagtgaacatttgtgtgcatgggtctttatggtagaatgatttatattcctttgagtatatactcagtaatgggattgctggctcaaatggtagtactgtttttagttctttgagcaatcaccacactgctttccacaatggttgaactaatttacactcccatcaactatgcatagcatccccttttctccactacctcaccaacatctgttatttttttactttttttttcttttttttttttgagatggagtttccttcttgtcacccaggctggagtgcaatggcacaatctcagctcactgcaacatctgcctcccaggttcaaacgattctccagcctcagcctcccgagtagctaggattacaggcgcctgccactacacccagctaattttgtatttttagtagagacgcagtttcaccatgttggtcaggctggtctcaaaatcctgacctcaggtgatccacctgcctcggcctcccaaagttctggaattacaggcatgagccaccacactcagcttatttgttgactctttaataatggccattctgactggcatgagatggcatctcattgtggttttgatttgcatttccctttttttttttttttgagatggagtcttgctctgtcacccaggctggagtgcagtggtgcaatctctgctcactgcaacctccacctcccaggttcaagtgattctcatgcctcagcctcctgaattacacctggaattgcaggtgtgccaccacgcccggctaatttttgtatttttagtagagatggggttttgtcatgttgaccacgctggtctcaaactcccgacatcaagtgatccacccgcctcggcctcccaaagtgctgggattacaggtgtgggccactgtgcctggcctgatttgcatttctctagttcagtgacattgaggtttttttcatatgcttgttggctgcacgtatattttcttttttttttttcgagatggagtctctctctgttgcccagactggagtgcaatggcacaatctcggttcactgcagcctccgcctcccaggttcgagcaattctcctgcctcagcctcctgagtagctgggattacaggcgtccaccaccatgtccggctaatttttgtatttttagtagagatggggtttcaccatattggccaggctggtctcgaactcctgaccttgtgatccacccacctcagcctctcaaagtggtggtattacaggcataagccaccacgcccggcctgcatgtgtatcttctttgaaaagtgtctgctcaaggatgtaacttgttaactcttttacctggcagcgttaacattctacttaagaatagaagaagcaaggtatcaaaggcttggcagagtccatctttaaacagtcgtgcctcctctcctggatgcagaagggataaaggcctgcaggggccaccctatatccctccctttgctaatttccctccctgggttttaccacgttcatcttcatcatcacactgaactctccacctcctgctcacccatcctctgtttcctaaggagtgccttcatgcattcttgtttgagcctcagaagcctcacagttcaccctcctcaaaggctgctccttctcctttctcaaaaaaaaaaaaaaggctttctcaaaatttggcaaaaataaaaatgctcctatcctttcaaccatcaacacctctcctaggagcagaccccggaaacacccgcagacgtgtgtgcaaacacagagagatggagtggttcatcgtggcactaggaaaattagcaaatagcccaaatctccatcattaggaggactggaaaatcaaatgatagtatattcattggtggactattatatatttgtaaaaaaaaaaaagagtgaggtaaacatgcatttactgatatggaatgatttccaagacttgttgttaactttcaaaagaaatgtacaaaatgacattatggtattcttctattctttttttttttaatcctacatatgcacagaagaatatctaagaaattattcagactgggcacagtggctcacacctgtaatcccagcacttcgggagactgaggtgggtggatcactggaggtcaggagttcaagaccagcctggccaacatggtgaaaccccctctctactaaaaatacaaaagttagccgggtttggtggtgcaggcctgtaatcccagctactcaggaggctgagacaggagtatcacttgaacatggaaggcagtgagctgagatcccatcactgcactccagcatgggcaacagagtgagactcctcctcaaaaaaaaaaaattattcagctttcccttctgaagaagggaatggagggtctgagggtgggaaggagacttaaatttcattatatatcctcttctactgcttgaaaaaaatgttaaccacatttacatggttaaaaaaatatgttggggctattccaagatggccaaataggaacagctccagtctgtagctcccagtgtgattgacacggaagatgggtgatttctgcatttccaactgaggtacctggttcatctcattgggactggttggacagtgggtacagcccatgaaggatgagccgcagtagggcggggtgtcgccttacccgggaagcacaaggggtcaggggatttccctttcctagccaagggaagccgggatagactgtacctggaaaaacaggacactctcgcccaaatactgagcttttcccatggtcttagcaaccagcagaccaggagattctctcccatgcctggctgggcgggtcccacgcccgcagagccttgctcactgctagcacagcagtctgagatcgaactgcgacgtggcagcctggttgggggaggggtgcccaccattgctgaggctggagtaagtaaacaaagtggctgggaagcttaaactgggcggagcccactgcagctcagcaaggcctactgcctctatagactccacctctgtgagcagggcatggctgaacaaaaggcagcagacagtttctgcagacttaaacgtccctgtctgacagctctgaagacagcagtcattctcccagcatggcgtttcagctctgagaacggacagactgcctcctcaagtgggtccctgacccccatgtagcctaactgggagacacctcccaggaggggccgacaaacacctcatataggcgggtacccctctgagacgaagcttccagaggaaggatcaggcagcaatatttgctgttctgcaatatttgctgttctgcagcctccactggtgatacgcaggcagacagggtctagagtggacctccaccaaactccaacagacctgcagctgagagacctgacgttagaaggaaaattaacaaacagaaaggaatagcatcaacatcaacaaaaaggacatctacaccaaagccccatctgtaggttaccagcatcaaagaccaaaggtagataaaaccacaaagatggggagatacaagagcagaaaagctgataattctaaaaacctgcgcgcctcttctcctccaaaggatagtagctccttgccagcaatggaacaaagctggacggagaatgactttgacaaattgacagaagtaggcttcagaaggttggtaataacaaacttctctgagctaaaggagcacgttcaaacccatcgcaaggaagctaaaaaccttgaataaaggttagacgaatggctaactagaataaacagcatagagaagaacttaaatgacctgatggagctgaaaaccatggcacgagaactttgtgacgcaggcacaagtttcaatagccgattcgatcaagtggaagaaagggtatcagtgattgaagattaaattaatgaaataaagcaaaaagacaaggttagagaaaaaagagtaaaaagaaatgaacaaagtctccaagaaatatgggactatgtgaaaagaccaaatctacgtctgattggtgtacctgaaagtgatggggagaatggaaccaagttggaaaacactctgcaggatattatccaggagaacttccccaacctagcaaggcaggccaacattcaaattcaggaaataaagagaacaccacaaagatattcctcaggaagagcaaccccaagacacataattgtcagattcaccaaagttgaaatgaaggaaaaaatgttaagagcagccagagagaaaggtcgggttaaccacaaagggaagcccatcagactaacagcagatctcttggcagaaaccctacaagccagaagagagtgggggccaatattcaacattcttaaagaaaagaattctcaatccagaatttcatatccggccaaactaagcttcataagtgaaggagaaataaaatcctttacagacaagcaaatgctgagagattttgtcaccaccaggcctgcctttcaagagctcctgaaggaagcactaaacatagaaaggaacaaccagtaccagccactgcaaaaatatgccagattgtaaagaccgttgatgctatgaagaaactgcatcaattaatgggcaaaataaccagctaatatcataatgacaggatcaaattcacacataacaatattaaccttaaatgtaaatgggctaaatgccccaattaaaagacacagactggcaaattggataaagagtcaagacccattattgtgctgtattcaggagacccatctcatgtgcagagacacacatagtctcaaaataaatggatggaggaagatctaccaagcaaatggaaagcaaaaaaaggcaggggttgcaatcctagtctctgataaaacagactttaaaccaacaaagatcaaaagagacaaagaaggccattacataatggtaaaggaatcaattcaacaagaagagctaactatcctaaatgtatatgcatgcaatacaggagcacccagattcataaagcaagtccttagagacctacaaagagacttagactcccacacaatactaatgggagactttaacacccctctatcaatattagacagatcagtgagacagaaggttaacaaggatatccaggaattgaactcagctctgcaccaagcagacctaatagacatctacagaactctccatcctaaatcaacagaatatacattcttctcagcatcacatcacacttattctgaaattgaccacataattggaagtaaagcactcctcagcaaatgtaaaagaacagaaatcacaacaaactgtcagaccacagcacaatcaaattagaactcaggattaagaaactcactcaaaaccacacaaccacatggaaactgaacaacctgctcctgaatgactgctgggtaaataacggaatgaaggcagaaataaagatgttctttgaaaccaatgagaacaaagacacaacacaccagaatctctgggacacatttaaagcagtgtgtagagggaaatttatagcactaaatgcccacaagagaaagcaggaaagatctaaaatcgacaccctaacatcacaattaaaagaactagagaagcaagagcaaacaaattcaaaagctagcagaaggcaagaaataactaaggtcagagcagaactgaaagagacagagacacaaaaacccttcaaaaaaatcaatgaatccaggagctggttttttgaaaagatcaacaaaattgatagaccactagcaagactaataaagaagaaaagagagaagaatcaaatagacgcaataaaaaatgataaaggggatatcaccaccgatcccacagaaatacaaactaccatcagagaatactgtaaacacctctacgcaaataaaccagaaaatctagaagaaatggataaattcctggacacatacaccctcccaagactaaaccaggaagaacgtgaatctctgaatagaccaataacaggctctgaaatcgaggcaataattaatagcctaccaaccaaaaaaagtccaggaccagaaggattcacagctgaattccaccagaagtacaaagaggagctgataccattccttctgaaactattctaatcaagaaaaagaaggaatcctccctaactcattttatgaggccagcatcatcctgataccaaagcctggcagagacacaacaaaaaaaagagaattttagaccaatatccttgatgaacatcgatgcaaaaatcctcaataaaatactggcaaacaaaatccagcagcacatcaaaaagcttcttatccaccacgatcaagtcagcttcatctctgggatgcaagcctggttcaacgtacacaaatcaataaacgaaatccatcacatagacagaaccattgacaaaaaccacatgatcatctcaatagatgcaaaaaaggtcttcgggctgggcacggtggctcacgcctgtaatcctagcactttgggaggctgaggcaggcagatcacaaggtgaggagatcgagaccatcctggctaacacggtgataccctgtctctactaaaaatacaaaaaattagccgggcatagtggcgggcgcctgtagtcccagctactcaggaggctgaggcaggagaatggtgtgaacctgggaggcagagcttgcagtgagccgatatcgcaccactgcactccagcctgggtgacagagtgagactccatctcaaaaaaaaaaggtcttcgacaaaattcaacagcccttcatgctaaaaactctcaataaactaggtattgatggaatatatctcaaaataataagggctatttatgacaaacccacagccaatatcatactgaatggacaaaaactggaagcattccctttgaaaactggcacaagacaaggatgccctctctcaccactcctattcaacgtagtgttggaagttctggccagggcaatcaggtaagagaaggaaataaagggtattcaatcaggaaaagaggaagtcaaattgtccctgtttgcagatgacatgattgtatatttagaaaaccccatcatctcagcccaaaacctccttcagctgatatgcaacttcagcaaagtctcaggatacaaaatcaatgtgcaaaaatcacaaaaatcctatacaccaattaacagacaaacagagagccaaatcatgagtgaaatcccattcacaattgctacaaagataataaaatacctaggaatccaacttacaagggatgtgaaggacctcttcaaggagaactacaaaccactgctcaatgaaataaaagaggacacaaacaaatggaagaacattccatgctaacggataggaagaatcaatatagttaaaatggccatactgcccaaggtaatttatagattcaatgccatccccatcaagctaccaatgactttcttcacagaattggaaaaaactactttaaagttcatatggaaccaaaaagagcccacattgccaagacaatcctaagcaaaaagaacaaagcgggaggcatcacgctacctgagttcaaactatactacaaggctacagtaaccaaaacagcatggtactggtaccaaaacagatatatagaccaatggaacagaacagaggcctcagaaataacaccacgcatctacaaccatctgatctttgacaaacctgacaaaaacaagaaatggggaatggattcgctatttaataaatggtgctgggaaaactgggtagccatatgtagaaagctgaaactggatcccttccttacatcttatacaaaaattaattcaagatggattaaagacttaaatgttagacctaaaaccataaaaactgtagaagaaaacctaggcaataccattcaagacataggcatgggcaaagacttcacgactaaaacaccaaaagcaatggcaacaaaagccaaaatagacaaatgggatctaattaaactaaagagcttctgcatggcaaaagaaactaccatcagagtgaacaggcaacctacagattgggagaaaatttttgcaatctacccatcggacaaagcgctaatatccaaaatctacaaagaactcaaacaaatttacaagaaaaaaacaaacaaccccatcaaaaagtgggcaaaggatatgaacagacatttctcaaaagaagacatttatgcatccaacacatgaaaaaatgctcatcatcactggccatcagagaaatgcaaatcaaaaccacaatgagataccatctcatgccaattagaatggcgatcattaaaaagtcaggaaacaacaaatgctggagaggatgtggagaaataggaatgcttttacactgttggtgggagtgtaaattagttcaaccattgtggaagacagtgtggcgattcctcaaggatctagaactagaaataccatttcacccagcaatcccgttactggatatatacccaaaggattataaattatgctactataaagacacatgcacacgtatgtttattgtggcactattcacaatagcaaagacttggaaccaacccaaatgtccatcaatgatagactggattaagaaaatgtggcacatatacaccatggaatactatgcagccataaaaaaggatgcgttcatgtcctttgcagggacatggatgaagccagaaaccatcattctcagcaaactatcacaaagacagaaaaccaaatactgcatgttctcactcataggtgggaactgaacaatgagaacacctggacacagggcggggaacatcacactctggggcctgtcggggggtggggggccgggggagggatagcattaggagtaatacctaatgtaaatgatgagttgatgggtgcagcaaaccaacatgggacatgtatacctatcaaacttgcacattgtgcacatgtaccctagaacttaaagtataattttttaaaaaaagaaaatacatatataattaaaaatatatggccaggtgcagtggctcatgcctgtaatcccagcactttgggaggccaaggctggcggatcatgaggtcaggagatggagaccatcctggctaacatggtgaaaccccgtctctactaaaaaatacaacaaaaattagccaggcatggtggtgggtgcctgtagtcccaggtacttgggaggctgaggcaggagaatggcatgaaaccggtaggcagagcttgtagtaagccaagatggcgccactacactccagcctgggcaacagagtgagactctgtctcaccaaaatatatatatatatgtatatatatacacacatatgtgcgtgtatatacttgtatatatgtgcatatatacacacacatgtgtgtgtatatatgtgcatatatacacacacatgtgtgtatatatatacatgttgctctcagaataaggatgtgtttgttccaattacaaaaaagcatgggcacttgattttgaaggcatttcttatgcctttctccattgtgatttacaattgccttcatggttttgagttttacaaagctgctgcttctataccagccccaggacaagctctcaggggttatgcatgtgagtgggtcagggcctctggggtggctgccagctgacagaggccctggggccagcattccaatcttcctcatccaatcacatcttgaaatgcttccatgtgtatccaaactacagtatgaagcctaatctgccaattccccgattaggagttgggaaactaggaaccctgtaggcctgctaaacgtgtggccccagcaggaagagcctgggggactgaagcatccaggagccactggggagcagacggaggggcacaagaaggttcctgttttatatagagagggcttgaaagatggagaacacttccatggacaggctcatcagggctggccaccaaatcaagaggtttcctggacaggtcatacatcaaaatgggcatcattccaaaagttagaacctatttggcagtgagcaatactggaaatacttcatagcacaatgtgactgcagccaaagcagtactcagaggaaaattcataatcctctaatggcttaagtgtttttatttatttatttatttatttttaaattagagacagagtctcactctgtcactcaggctggagtgcagtggcacaatcacagctcactgcagcctcaaccttcccaggctcaagcaatcctccagtctcagcctcccaagtagctgggactacaggcatgagccaccacacatggttaatttttgtatttgtgtagagacaaggttttgccatgtgcccaggctggtctcaaactcctaggctcaagtgatctgcctgccttggccttccaaagtgctggggttacaggcatgagccactgtgcccagccaagtgtttatatttaagatgagaaagactgaaaagtaattactttgtgtcaactcatgaaggtagagttggagaagaaggagaaacagagtaaaaggaagaggagggaaggatgagaggaaggagaaaggacaaaataaagaactctctaaacagagtctctgagagttgggagatcaagccccaggttctcaccctgcccagatccctctgtcctcagacaggtcagctctcctgattcattttcttctctcttccatatccctaatcttgtgcactggggtagggctaagaattgggtagggaggaggtatatgaagcaatcagtgtcctagcctgctatgccaatggcccccagggaacattgggcaatgtctggagatattgttggttgttacaactgggaaggagtgtgactgacatctagtgggtggaggtcagggatgctgctcaacactctacagtgcagaggacacccctcacagtgcacagaataatcctaccctgcaatggactcaatgtttgcatccccctgaaaattcatatgttcaaatcttaacctccgaggtgatggtgttgaggtgaagcttctaggagatgatcaggttatgaaagtggattgctcatgaatgggattagggcccttataaaagggactctaggccgggtgcagaggctcacgcctgtaatcccagcactttgagaggccacagcaggcaaatcacttgaggccaggagtttgagaccagtgtgcctaacatggtgaaatcctgtctctactaaaaatacaaaaattagctgggcatggtggcatgtaatcccagctactcaggaggctgaggcaggagaatcacttgaatctgggaggtggaggttgcagtgagccaagctcgtaccactgcactccagcctgggcaacagagccaggctccatctcaaaaaaaaaaaaaaaacaaaaacaacgaaaaacttactaatagcagttgttaatattatactttaaaaacacctattattgccaggcgcagtggctcatgcctgtaatcccagcactttgggaagccaaggtgggcgaatcacaaggtcaggagatcgagaccatcctggctaacacagtgaaaccccgtctctactaaaaatacaaaaaaaaaaaaaattagcggggtgtggcgggcgcctatagtctcagctactcaggaggctgaggcaggagaatggcgtgaacctgggaggcggagcttgcagtgagctgagatcgcactactgcactccagcctgggagacagagcaagactctgtctcaaaaaaaaaaaaaaaaaagaaagaaagagagaaagacacctgttatttagttaaaattttcttccaggccaggtacagtgactcacacctgtaatcccagcactttgagaggctgcggcaggcaaatcacttgaggccaggagttcatgaccagcctggccaacatggtgaaaccctgtctctactaaaaatacgaaaattagacaggcatggtggcatgcctgtaatcccagctactcaggaggctgaggcaggagaatcacttgaacctgggaggtggaggttgcagggagccaagatcacaccactgggggtgtggtcacacagcctgggggacagattgagtgagactccatctcaaaaaaaaaaaggctccagagagctccctcactccttctgccatatgaggatacagcaagaagccagagggcaccatcaatgaagcaggaagtgagccctcaccagacacccaatcagctggtgccctgttcttggacttccaagccccaagaaccatgtgaaataaatttcagttgtttataagccactcggtctatggtcttctgttatagcagccaggaaggacaaagacaagccccagatgttaataggaccagggttagaaaaccttgctcaatgtataagccgttacctgggggggtgcctggaaggagccactgccaccaggctccctgtgtggggctggaaagcggggacagcctcatcggtgtagaggccaccgtcctgccggtggttcaggctcactcggtcggtcatcaccaccagtcccgtttcctaggcaacagacaacacccaaaccattggtggggaagtggatgctgacagcccccagaagcataagggaatgaatcaccctgtggccactgtcccaatatcagcttgtggcaaccttgggggcatcattctttttttgcttttttgggtttgttttgttttgttttgtttgtttgttgttttttgagacggagtctcgctctgtcgcccaggctggagtgcagtggcgcaatcttggctcactggaagctccacctcccaggttcacgcctatctcctgcctcagcctccctagtagctgggactacaggtgcccgtcaccatggggcatcattcttttactctgggtttggtggcacaggctggggagaacgtgggacccagtgaccatccagggtggagaagagagaacagcacatttgaactgtgcaaccaaatcagatggtccaaacacaaaaggccatatgttgtatgattccgttgagatgaaacgcccagaacaggcaaatccatagagacagaaagcagatcaactggtgactgccaggggctgagggaggggaaatggggagtaattgctactggggatggggtttccttttgggggatgaaaatggtctggaattaagtaggggtggtggttgcacagcactgtgaatataataaatgccactgaattttaaacggtgagttttatgttatatgaatttcatctcgattagaaaaatcatggccaggcatagtggcacatgcctgtaatcccagcattttgggaggccgaggtgggcggatcacttgagatcaggagttcaacaccagcctggccaacacggtgaaaccccatctctactaaaaatacaagaattagccaggcatggtggtgggcacctgtaatcccagctacttgggaggctgaggcaggagaatcactggaacccaggaggcggaggttgcagtgagccaagatcacaccactgcactccagcctgggcaatagagcaagactccatctcaaaagaaaaagaaaagaaaagaaggaaggggaagtgaggggagagcaggggaggaaatcagttggcgcagtacctgaccccaaccaaggaccaacggtgggatgcaatgatctcttttattagtattagtattattagagacggcctccatctgtggttcaggctggggtgcagtgctgcaatcatagctcactgcagcctcaaactcccaggctcaagtgatcctcccacctcagcctcttgagtagctgggactagaggagtgcaccaccatgcccggctatgcaattagtctttttattctgtcctcatcattgtactaattactgggagcaactggatttgaaagaagactcactgtagcctgggctgacttggatttgtgaacaagaattttttttttttagacggagtctcactctgtcgcccaggctggagtgcagtggcgcgatctcggctcactgtaagctccgcctcccaggttcatgccattctctcctgcctcattctcctgagtagctgggactactggcgcccgccaccacgcccggctaattttttgtatttttagtagagacggggtttcactgtgttagccaagatggtctcgatctcctgacctcgtgatccgcccgtctcagcctcccaaagtgctgggattacaggcgtgagccaccgcgcccagcctttgaataagaaattcaaacccagttcctttgactcaaaggcgtcacctctgacttccagaagggacctggagttcaaactgccaggcagttcacatactcataaatgaaatgttatttttcaaaacaaaaaacaaaacacaaaggtttattttgccaggtacagtggtgtatgtctgtaatcccagcacttcgggaggctaacgcgggtggatccattaagcccaggagttcaagactagcctgggtgacatggtgaaaccccatctctataaatacgaaaaaaattagcgaggcatgatggcgtgtgtctgtggtcccagctactcaggaggctgaggcaggaggatcgcttgagcccaggaggtcgagactgaagtgagctgagatcacgccactgcataccagcctgggtgacaaagtgagatcttgtctcaaaaaaagaaaaataagagatttttttgtttgtttgttttgtttttagcaaatagaactgtgggaactaggtggcaggcatgtgggtatttgtctaattcgctcaacttttctgcatgtttggaaattttcatcataaaagcaacacaggttggggagggaaggatgcctttgaaattttatttatttatttaatttcatttttttgagacagagtctcgctctaccacccaggctggagtgcagtggcgtgatcactgtaacctccgcctcccagttccagagcttctcctgccttagcctcccgagtagctgggattacaggcgcccaccaccacacccagataatttttgtatttttagtagagacggggtttcaccatgttggccaggctggtctcgaactcctgacttcaggtgatccacgtgtcttggcctcccaaagtgctgggattacaggcgtgagacaccacacctggccagaaatattttttaaagctgaaatgaaaggcaccctccaatgggacacgcatttgagtggagaccaccagcaccctaaggtgtgaccctgaagggcgaagcatgctcccatcccaatccctttctatctatatcacatcatgaaaacgtccagagatgggcacctgatagcattagccctttttttttttttttttttttgagacggagtctggctctgtcaccaggctggagtgaagtgatgtgatctctgctcactgcaacctccacctcccgggctcaagtgattctcctgactcagcctcccaagtagctgggactacaggcatgcaccaccacgcccagctaattattgtgtttttagtagagagggggtttcaccgtgttggccaggatggtctcgatctcttgaccttgtgatccgcccacctcagcctcccaaagtgctgggattacaggcatgagccaccgcgctcagccagcattagccctttttttttttgagacggagtctcgctctgtcgcccaggctggagtgcagtggcgcaatcttggctcactgcaagctccgcctcccaggttcacgccattctcctgcctcagcctcccgagtagctgggactacaggcgcccccttagccctttttaagatgggtaaactggagctgggcacagtggctcatgcctctaatcccagcgactagggaggctggggcacgaggatcacctatgcagttcagaccccctgccacctgggatcacagccacctccttctgcttgaaagctgccagacacacaaccaagttaaccaaagccgaggcagagctaagagctactggcacccacagctcccaatgagaaggttttcctcgcagcaaagcacgtcaatgtcataacacgtcccatcacaagttcaagttacccatttgaacctgaccattgacatgcataacattctgctctccacggctttgcaaattggaagaatctacttgtgagctttcactggggagaaatgaaaaagaaaagtttggaaggctgggtgcaatggctcatgcttgtaatcctaacactttgggaagttgaagcaggaggattgcttgaggccaggagtttgacactagccagggccacgtagcaagaccccatctctacaaagaaataaagcaaaataaaattagccaggtgtggtggcatgcacctgtagtgccagctacttgggagactgaggtgggaggatcacttgagcacaggtgtttgaggctgcagtgagctatgatcacaccactgcactccagcctgggccacagagcgagaccccatctcgaaaaaaagaaagaaaagcttccaattctgtttccaacccatttctgaatctccaagactcttatttctaggcaagaggaacttagaagggggcagagggatctgagaccacctctccttacggtgaaggcaaacccagagtccttggtgatgccccaaggccacgggaagacagaggagcgccggcgtcgttgtgccgtcagcccagcccaccaaaaaggaccatcctccctggacacgccaaaggaatcagaaacatcataatcttccagttcctggaaaacctgcaggcaaagggggacagagacttgtcagctgaagttttctttacaacccaaactggctcccgtgggtgtggcatgctcccatcccaacctctttatcacgtcatgacaacctccaggagatgggcactggtagcatcagcccattttaagatgggcaaacaggagccaggcacagtggcccatgcctctaatcccagttactggggaggctgaaacaggaggctggcttgtgcaaaggagttcgagaccagcctgggcaacatagcaagaccccgcccctacaaaagatagaaaaaattagccaggcgtggtggtgcatgcctgtagccccagctactctggaggctgaggtgggaggatcgtttaagcccaggaggtgttcgctacagtgagctatgatcacgccactgcactccagcccaggcaacagagcaacatcccaactctaaaaataatataaaataagatgggcaaattggagccagagaggtgagacctggcccaatgtcatgttgcaaaaatctgatgaccttgactccctgatcttgcaactgtgctgaagcagcaggaaggatttatcagacacccattaggttccctgaaaaatgaacccgacggagaaagcgaatctggattcaaatgccactcttcatttattggaatgagagatgggaaagggagagcaagagaaggtaaagccccgtggaggtctagaacccaagcccgaggggtctgctcacctgggcaggagtcagccggaacccagacctgagcaggtagacactcttatcaactgcggcgacgcacacacagctgccccttgcagccctgatccgcaggtcgacaacctccccaggttgggtctcatttgctgaatacgtcactgaaaccttggcgcaaatgcagcaagggataagaaacttggttcagttggctgtgagtggtggctcacgcctgtaatcccaacactttgggaggccgaggcgggtggatcacctgaggtcaagagttcgagaccagcctggccaacatggtgaaaccccatctctactaaaaatacaaaatttagctgggcatggtggcaggtgcctgtaatcccagctacttaggaggctgaggcaggagaatcgcttgaagcccagagacagaggttgcagggagctgagagagtgtggttgcaccccagccagggcaacaagaatgaaactccatttcaaacaatgaaaaaaagaaacttggttcaatccaggtttggtctagtccagaggcatctcttctgccccacccatgcaccccctgcccaccaaggagagtgggtctttgccagctcagctgggaacctggcctcgctacctgggtgaaactggtcccacactgtgaagggcagctggtcattgtgcagcgggcacaaagaagggaacacagagggacaggcagagatgggaaggcaggtgctggcggagagcctgtggcagtttgtttacaagttgcagggaggagccaggcgcagtggctcacacctgtaatcccagcacttcgggaggctgaagcatgtggatcacttgaggccaggagttcaagaccagcctggccaacatggtgaaaccccatctctactaaaaatacaaaaattagccagacatggtggcacatgcctgtagtctcagctactcgggaggctgaggccggagaattgcttgaacccgggaggcagaggttgcagtgagccgagatcgtgccactgcactccagcctgggtgacagagcttgactccgtctcaaaataataataataataataaagttgttgcagggagggggagaggaggctgagggtgccaatggaaacaagtgctgtcccttaaatcctgaattcaacaaaggcagagaataattgatggctttccccatgtgttttgaatgcaatctccttttgtgtgacttttggagatgcttcagtaaagatgcaactcatgttcccataattccttacatcatgctgcgacacaacatgagtctcaggtgtgcacagaccccctggccagcaccttggagaagccccgatggcccctggctgtgtcccaggttcagtgcacgatgctctacctggttttcgaagaaggtctcgactgcaaactgaaggctgtcggcgaccccttctccattctccctgacgtagaagaccagcaggcgaccaagggggaccatgctgggggtcacggccagatgaagagaggtcacacacacgtcgacctcagcttctggggctggtgggggctctgaggtgagcaaaagtagagagaggtggtgaattctccgcatccgacatgcaacctcagccattcaggctctgccccaatttgccctgcgctatgctcctgtctacgcattgagacagtctgcatctttggttttgagatgcccttcccaggctacatcctcagtcaatgctgactctttctattgactcagctctagggtcaccatgggctcctacagagcaggctggaatttgcctagaatcatcctctctgccggggaacatggtccctgctccctgaccagccctctgcttcctccgcggacaccaaaaccaccttggcttgtccaggcagcaccactgcagctccccaatatgcccctgacctccagtccctccctctgattggctctgtcttgctggggcctggggccagcagacctgggcagccattatttgctgacttgaaccgagttcatactgccttccctgtgggtaaatgatccttaaaggatagaggatcttagaagcctgtccaggcactcccaaatactctacggcaagagaatgagggtagaaaggctcccagttccagaatgggccatctgtcagctggttctgtgcagagctcagagcagccagtggacagggatggtaggggaaagcggggacacaaggaaactcatgggcaacaggaggaagtgggtacccaatcggccttggggttcaaatcttggctctggcccctactaggcaatgggaaagtccctgaaacccccacccccaagtcacagcccattcatctgcagatggacacagtggaaccaccaccatcccaggctgcagtggggttaaatggggacagattgtggggagttccaagcccagggctggccctggacaaggattccagggagacataaagtccctgttatttcacccagaagagaagagaagaccaagagggtgaaggtgcaccatgcccaaagcaggactctggccagcagttctcagccaaggcaattctgctacccaggggatgctggcaatatctgcggatgttttttggtcatcactgctggaggggatgctactggcttccggtgaatagaagccagagatgctattcagcatcctacagtgcatgggatggtcccaaatgttgacagtgcagagggtgagaaagcctgcctaagaaggagggatcttctctgtctgtctatctatccatccatccatctatccactcatctttctatctatccatccatccatctcttcatccatccaccatctacccatccatccactcacccaccatccacccttccctctattcatcaaccatccatcatccacccatccaaccatccacccatccctctattcatcatccatcatccacccacccaccatccatccatttatccatccatcatccacccacccatccaccatccaatcatctatccatctgttcatccatccatctgttcatccatccatcatccactcatccacccaccccactatccatccatctattcttccatccatcatcccccattcatccacccactatccatccatctatccatccaaccatccatctattcatccatccatcatccacccatccacccactatccatccatccattcatctattcatccagtcatcatccgcccacccactatccatccatccatccatctattcatctaatcctcatccacccacccattagccatccatccatccatccttctgtacctccatccatctattcatccatccatctattcatccagccatccatctgtccattcatccatccatctgtccatccatccatctgtccattcatccatccatccatccatccatccatcttttggtccatccatccatccatccatctatcaatccacccatccatctgtccattcatccatccatccatccttctgtccatccatcttttggtccatccatccatccatccatctctctgtccattcatccatctatccacctatccatccatccatccatccttccatctatccactgttctatcagtccatccatccatccatccattcatccatctttctatctgtccatccatccattgatccatccctctatcatctatagggctattggcatctatggggtggaggccagggatgctgctcaatatcctacagtgcctccaccacagagaatgatcttgcccaaatgttgatagtgccaaggttgagaaaccttgccttcgcctgagagatcctgcctatctatctatccacccatcattctgtctatctacctacctatctcagtgtcctcacctggaagtgactctgccccctggggatagtggcaatatctggagactctttaggtcatcatactgtggaaagttggtactactggcatctggtggggagagaccagggatgctgctcagcaccctacagtgcacaggacgcccccactctggagtgatccacccccttatatatgtctatagtgctcaagttggggaccctgtattgagaagaagagctttgaagaggaggggactaaggaagtcccctgggaggagggccttatgaggagcacatggtgtcaaaaagagaagaggaagaggactcataggcagaaccgcctgggcaaagaggcaacagcacaatgtgggccagtgcaagagcctagtctgtggctggctttccctgtcccctgcacacacagagtgagaagagtctggggcctgaacctctccacttccagcagctgatcactgtcttcctggacccagtctggtattgttaaggatgtgtcccctctgacccaaggcatgctcccctctctgctgggtcttgccttgtccctccttgcaggagcacccatctcagtctcaattgttcagaaggaagaacaggaaccttctccctgctgcccggctcacctgtctcagaaaggtgtgttaaacgaatcggtttctccagggcaggggccgcccgcttgcttcgctgctgggtggtgtgggcaggctgctggcccgatagcacaatattgccccgtgcagccacctcgtagtacagggtaaagttgcagggacatgtggacttcacagaaaaataggcttcttccccaacctatggaagacacgcagcatggggggctctgcctcgcaccaatgttgcaacccaccacaggaagacggccattctggggccagagggaggttgggatggctgagggagcggagtgcccagcatccagtcctggcccctagcttttttgttttttgttttcttttttaagatagtgtttcactcttgtcacccaggctggcatgcgatggtgagatctcagctcgctgcaacctctgcctcctgggttcaagtgattctcctgcctcagcctcctgggtagctattacaggcgcccgccaccatgccggtataatttttgtatttttagtagaaacggagtttcaccatgttggccaggctggtctcgaactcctgacctcgtgatcccagtattttgggctcacgcctgtaatcccagcactttggggggctgaagcggacagatcgctcaagtccagaagttagagagcagcctgagcaacatagtgagacccccatctctacaaaaagcacacacacataaaattggccaggcgtggtggcacatgcctgtagtccccgctactcagggggctgaagtgggagggtcacttgagcctaggaagtcaaggctgcagtgagccatgatcgcaccactgcactccagcctgggtaacagagtgagaccctgtctccaaaaaaaaataaaaataaaatactgtttcctaactttgaacgtgctaatgccacaagtgggctgggccttctcttaggatatgaactcaatgagttgggtcctatcatagtccccaagttcctagaggggaaaactggaaactgaggccttggttctttgcccaatgtcaatgagtgtagggcaggattcaaactcaggggaactgatgctaaggccccacattgaaccctgaagctgccattattctgatatcaggaaagctaaggcctcccaggtcctaagatctccctagggggttggcgtgtggccatgtccaacactttgccctaggaatcccgcctctgttccatgttttgcaatctgtgactgtccccaaatgttgggatcaccctgaaagcccagaagagggatatctggagtaggggaagagtgacattcttgccgtggaagcttgggcaaatcatttcacctctctgagcctcagtttccccacctgtaaaataaggctgttatctcctggacagagggtcctgaggctccaatgagatgatgtgtgtgtcatgctcaacatcacacaatgcacactgtaggtggctaataagtgtcattctggccaggggccatggctcacacctgtaatcccagtattttgttaggctgaggtgggtggatcacttgagcccagaagcttgagaccagcctgggcaacaaagtgagatcccgtctctacaaaaaatcaaaaaactttggccaggcgcagtggctcatgctttgtaatctcagcacattgagaggccgaggcgagaggattgcttgagtctaggagttcaagacccgccacagcaacatggtgaaaccccatctctacaaaaatacaaaaattaggtggatgtggtggtgggtgcctgtggtctcagctactcgggaagctaaggcggaaggatcacttgagccagggaggtcgatgtgcggtgagtcatgatcatgccactgcaccctagcctgggcaacagagtgagaccctgtctcaatcaatcaatcaatattttttaattaaaaaaatatatagtaagaaaaataaatgtcattctacctccccctaaaggaagaatctgcctgtttaagaagctgggcctaagggactcccacagccaaatttggaaaatttgagcagcaaaaagaagaatgtcagctgagtgtggtggctcatgcctataatcctaacactttgggaggctgaggcaggcagattgcttgagttcaggagttcaagaccagcctgaacaacatggcaaaactccatctccacaaaaaataataaaaaaaatagctgggtgtggtggcacaagcccatagtcccagctatctaggggggctgaggcaggaggatcacttgagcacaggaggtcaaggctgcagtaagccatgactgtgccaccaccctccagcctcgggtgctatggtttggctgtgtccccactcaaatctcatcttgaattgtagctcccataattcccatgtgttctgggagggacccagtgggagataactgaatcatggggacagtttccccaatacagttctcatggtagagaatgagtctcgtgagatctgataattttataaggggttttccttttcacttggttcccattctctcttgtctgccaccatgtaagatgtacctttcaccttctgccatgattgtaaggcctccccagccacgtggaactgtgaatccattaaacctctttttctggctgggcatggtggctcacgtctgtaatcccagtactttgggaggccaaggcaagcggatcacctaaggtcaggagttcaacaccagcctccccaacatggggaaagcccatctctacaaaaatacaaaaattagcaaggcacggtggcaggtgcttgtaatcccagcccaggaggctgaggcagcaaaattgcttgaacctgagaggcagaggttccagtgagctgagattgtgccattgcactccagcctgggtgacagagtgagactccatctcaaaataaataaataaataaataaataaataacaataaacctatttttctttataaattacccagtcgtgggtatgtctttatcagcagcatgaaaacggactaatatactgagtgacagagcaagaccctgtctcaaaaataaattaattaaaaacaaagaaaggaaaaagaagaatgtcaaggtcgtgaaagacaaggaaagaataaaattttcagattggaggagaccaaggagacgtgatgactaaatgtgacgtgggaccctaaaggtgatcccggaccagaaaacaaggccatgagtgggataacttggggaaatccaaataaaatctggagtctggttaacactgatgtccagtgttgattcttagttatgacaaatggatcatagtcttgtaagatgttagcattaggggaagcctatcaaaatctcaatggccttttttgcagaaatggaactgatcttaaaatttatatgaaaacacaaaggactcaggaatcttgaaaaagaagaataacattggaggactcacacttcctaatttcaaaacttactacaaagctacagtaatcaagacagtgtagtaccagcataaggagagacatagaaaccagtgggatagaagtgagagccctgaaatgaatccagacagctaagggcaactgatttgaaataagggtgccaagaccattcaatggggaaagcatagtctttttaacaaacagtgctgagacaactgaataggtacatgcaaaagagtgaagttggtctgtgggtggtggctcacacctgcaatctcaacactttaggaagctgaggtgggaggatcacttgagcccaggaggttgagctgcagtgagctatgatcacactactgcacctcagcctgggtgacagagcaaggtcctatctcaaaaaaaaaaaaaaaaaagagagagagagagagagagagaatgaatttggatccctacctcacaccatataaaaaaattaactcaaaacagatgaaagacctaaatgtaagagctgaaactataaaactcttaaaagaaaacacagagataaatcatgaccttagatttggcaatggtttctttgagatgtggcatcggaagtacaagcagcaaaagaaaaagagaaattggatttcatcaaaattaaaattttttgttgcactaatggacactgtcaggaaagtgaaaagataacccatagtataggagaaaatgtctgcaaattacacatctgatgagggctagtatccagaatttagaaagaactttcacgactcaacaaagataaacaacccaattattaacagtagtggggctgggtgtggtggttacatctgtcatctcaacaccttgggaggctgaggcagagaggatcacttgaggccaggagttcaagaccagcctgggcaacatagtgaaacccctaaaaaccaagtacatacacatgggtgagcatgcacacacactcacacaaatgcacatgcacactcatgtgtagtcacacatgtgtgatacaatcatgcagtcacatatgcatgcaaacaaacactaaatgtaaattacatttttagggtacccattgaaaatctgaatattgcctatgaattagacaatataatttggtgaatgtaattttcttaggtgtgacctaagaaaatggccttgaggtcaggtaaaataatgcctttttttaagtatacattatggtcaagtatttaagagtgaagcactatcatgtttgtaacttgctttcaaatgctgcagccaaaaaatgtgtagagaaatagatggatgcgtgaattggcagatggatggatggatgaagggagggatagagggagaatggatgaagggagagtggatgaatggatggatgaagggtgcatgtatggatggatggatgaagggtggatgaatggatgaagggcggatggatggatggatggatggagggtagataaataggtaagtgtagtgggtggatggatgggtggaggaaagaaagaaaggaggaaaagaaggagggagagagggtagatggatggatggatggatggatgaagggtggatgaagggcagacggaaggatggatggatggatgataaatggataggggtagtgggtggatagatgggtggagaaaggaaggaagggaaggaagaaaggagggagggagagtaaatggatggatggatgatggatggatgaagggaggcgcagagggagggtggatggatggatgaatagatagatggaggatggatggatggatgaagggtggatggatggagggaagatgagtggataaagggtagtaggtggatggatgggtggagggagggaggaagggtgaatgaatggagggagagaggatagatggatggagggatgaagagagggacagatggagggatggagagagagatggagggtggatggagggatgaatgaaaggatataggcaaagcattaatttataaatctaggtgaaagtctcatggttgtttattatattaacatttttcaatttcactctaaatttattaatgtcccccttataaaaagacacccaaacagaagtccccttctgcttgagatcttggggggaaaaggagagcacaaacctttctcctcttctttactaaatttatggcatcaaaacaaccttaaaagattggagtgagcgcccccattcaccaagcaaaacaggttcagaaggatgggtgccaagatgtggggagtggagccccccagttcccccctgccggggccctggcgctagaagaagaggaagaggtccctgcaccatgcccagcctggccccagcatgaacccatcttccctccatgccctgaggttgtgcccgggcccctcatggcagtttggtgggtaggacgcgctggggtttctgagccacctcaaacaggattgagattcacccggggagcaaaatctgagtgacagagccaggtctccccctaatcagaacaacagtctggccagctgagaacacaaggttccttcctgtcccctgaggaggaggccagcaccagcgtccccaccctgcaccactggtttaatggaattacaagaagaacagtgtgttcagccaagctgggcatgatcctgtctgacttctcattcttacaacctctgcaaagggctgttaatcccaggaaacaggcagccttggcgccacgattcctccaagctgaaccccaggggcctcgatatgatcagaaaaggagtgtgagaggtttatgggctggtagggccctgggcgctgtgatggcaactggtttccattaggggtgacatttctgccaaggctggggctatagcttgagccagaggctctgctgggattgcggccaggatgcaaacagcccagccagtgagcctgccaccagtccacaaagttaacagaggggtgatgtatcttaaatatagatgtgtatggccaggcgcggtggctcacgcctgtaatcccaacactttgggaggccgaagagggtggatcacctgaggccaggagttcgagaccaccctggtcaacatggtgaaaccctgtctctactaaaaatacaaaaataattagccaggcatggtggcaggtgcctgtaatcccagctactcgggaggctgaggcaggagaagtgcttgaacccaggagatggaggttgcagtgagccgagattgtgccactgcactccagcctgggagacagagactctgtcaaaaaaaaaaaaaaaaaaaaaaaaaaaatatatatatatatatatatatatatatatgtatatgtgggtatctagatgtctatgaacacacatgtacacagcatatccatatatatgcacatatatacagttgacccttgagaaatacaggtttgaactgcccacaacactgatgtgtggattttcttccacctctgcccaagcaagacagcaggaccccctctcctcttcctcctcctcctcagcctactgaacgtgaagatgacaaggaagaagacctttacaatgatccattcccacttcacgaacagtcaagatattttctcttctttatgattttttttacctgcgcctgccagcgtaagaaaatcttatgattttcttaataatattttccttcctgtagcttacattattgtaagaatacagtatatcatgcatagaaagtacaaaatctgtgttgattgactctggccaatagtaagctatagataaagtttagttaagtttagttttgagacagggtctcgctctgtcacccaggctggagtacagtggcacgatcatgtttcactgcggtcccaatctcccgggctcaagtgatcctcctgcctcagcctcttgagtaattgggactacaggcatgcaccaccacatccggctggggtttttttgtttttgtttttgttttgatagagatgtgatttcaccatgttgcccaggctggtctcaaactcctgggctcaagcaatcctcccgcctcagcctcccaaagtgccaaggttacaggtgtgagccaccacgcccggtcgggaactctactttttgttcaaggtttttataaagttacaactgctcttaaaaaattaagtctattaattaaaagaaaaatacacacacacaccttatgtaatcagaattgcaaaataatagacccaggaaaaatgaatggcagacacggctctaaatttaccttgtctttgcactcagagtgtctgtgtggagaaactcccagggcctctgcactaagggaaggctcaaggcagtggggaatctggccccatagcagcagctctatgtcaggtctgggtgcagtggtgccctggggcagagtggtgatcatcattgtcagccctgggccacagcctaaatgtccataacaaataaatagcaacgagccgggcgtggtggctcacgcctgtaatcccagcattttgggaggccaaggtgggcagatcacttgaggtcagaagttcaagaccagcctggccaacatggtgaaaccccgtctctactagaatacaaagattagccaggcattgtggtgggcacctgtaatcccagctactccagaggctgaggcaggagaatcacttgaaccctggagacggaagttgcagtgagctgagatcgtgccactgcactccagcctggctgacagagtgagactccacctcaaaaacaaaacaaaaaaaaaaagaaagaaaagaaacaaatagtaatgcatgcatgcattctgcagaattctccccttgctggggagataagggatccctgtgtcagctgtagtattaggtcccttagagcaggggtccccaacccccagggccatggaccagtactgattcatggcctgttaggaaccaggtcacacagcaggaggtgagtagtaggctgacaatcaaaacttcatctgtatttacagccgctcgcatcactcatattaccatgtgagctccacctcctgtcacatcagcagtggcagcattagattctctcaggagtgtgaaccctattgtgaactgtgcttgcacgggatctaggttgcatgcccctaatgagaatctcatgcctgatgatctgtcactgtctcccaccacccccagacgggactgtctagttgcaggaaaacaagctcagggctcccactgattctacatgatggtgagttgtatcattgtttcattatatattgcaatgtcataataatagaaatgaagtgcaaaataaacataatgtccttgaatcatcctgaaaccatcccccgtgcccgtgcccccgtctgtggaaaaattgtcttccacaaaaccaatccttggtgccaaaaaggctggctactgctgccttaggggctcactcatgctgtgtcttttttgaggagtctggctttgtcgcccaggctggagtgcagtggtgtgatctcagctcactgcaacctctgcctcccgggttcaagcaattctcctgcctcagcctcccgagtagctgggattacaggcacgcaccaccacactcagctaatttttgtatttttagtagagatggggtttcaccatgctggccaggctggtctcgaaatcctaacctccagtgatccgcctgcctcggcctcccaaaatgctgggattacaggcatgagccacagcacctggctcatgctgctttttggatcccgcatggcccaggaagggtagctcctgaaaatcttacctgcagtgggtgggagggtggctgcagctgcaggtagcactggctgggggagtaccagctgccgagggagaggtagctgggcaggtactgagcccccacaggcttcccgttcagtgccatcaccttggtctgagaagagaagatgcttagatcaacacccgagtgccaagagcagaaagggggtcttggggatgcttctgcttgctctgcccagaagaaacaccctctcatgctccaatatccctttggggaaccccctccccaatcctcagggagtaatagccagttgtccagcccattcttcctagcatcaagaagcaagtgtccagctgggcacagtgactcacacctgtaatcacagcacttcgggaggccgaggcaggtggatcacctgaggccaggagttcgagaccagcctggccaacatggagaaaccccgtctctactgaaaaaatacaaaaattagccaggagtagtggcgcatgcctgtaatcccagctactcaggaggctgaggcacaagaattgcttgaacccaggaggcagaggctgcagtgagctgagatcataccactgcactccaggctggcaacagagcaagactctgactcaaaaaaaaaagaagcaagcatccaagattggtcaaagggtattgggggtcaggcagagtgggtgcatacctataatctcagcattttgggaggcagaggtgtgaggatcacttgggcccaggagttcaagaccagcctgggcaatatagcaagatccagtctctacaaaaaatttgtgcctggagactcagctactaggggaggctgaagcaggaggatcacttgagtccaggagttcaaagctgcaatttagctatgatcacaccattgcactccagcctggacaacagagctagaccgtatctctgaaataattttaaaaagaagttgggccaggcgcgatggctcacgcctgtaatcccaccactttgggaggccaaggtgggcagatcacgaggtcaggagatcgagaccatcctggccaacatggtgaaaccctgtctctactaaaatacaaaaaattagccgggcatggtggccggcaactgtagtcccagctacttgggaggctgaggcaggggaatcacttgaacctgggaggcagaggttgcagtgagctggaatcacgccattgcattccagcctgggcaataagagcaaaactctgtctcaaaaaaaaaaaaaaaaaaaaaaaaaaaaagttggcctgcctctgtctctggctcctgggaagtaggtagactctaaatagggtataaacgggccacaccagaaaggccagttgtgtgattagatggctgggctttgagccacaggttatcagcccatctccagggaagggagagggcaggagattgagattagtcccatggccaatgatttaatcaatcatgcagacgaaatgaggcccccacaaaaaactttggacaccaaagctcaggtgagctttcctgcttagcaatgctcagcttgtggggattacatatcctggttctgtgcagagaacacacaaagcttccaatctgggaattgcccagacctcaccctatgcatctctctctttggttggttctaatttatgtcattttgctatggtaaagctgtaattaaaaggtggtagggtagtggaatttgcagccagtaggtgggaagcacaggtggcccggggacccctggacttgcagctggtgtcagaatttagggtagtcttgtggagagggctgtgcctaccacctgtgaagtgtggcccagctccaggtagctggtgtcagaagttactgcaatctcccacctggtaggggatgggcagggcagatctctggttcctcaaggagtctgagagatgccaggctgtggtcactctcttaaaacaggacagtgggccgggtacggtggctcacacctgtaatcctggcactttgggaggccgaggcaggtggattgcctgaggtcaggagttcaagaccagcttgaccaatatagtgaaaccccatctctactagaaatacaaaaattagctgggcgtggtggggggcgcctgtaatcccagctactcgggaggctgaggcaggataatcgcttgaacctgggaggccgaggttgcagtgagccaagattgcaccactgcactccagcttgggcgacagagcaagactctgtatcaaaaaaaaaaaacaacagaacagtggcccaggtgaccaaacagctgtgctgtgtgttgagcagcaggtccaacacaagaaagcgtgaacccatctggctgtgaatgtcaagtggcaaggcagtggcttcagtggttaaaacctttaggacatggtgcccacagaggacaaagtgaccacagtgtcctcagttcccatctacgtatttactctctgcagggccgccaggtccactgccagttcccaaagccaagggctgggacatcctctccagtccctcctgttcttgcctcccctgatgatgggacactaaggccttctggatctacttcctcaagagctccagtttggagacctctctgtcctcacctcctgtctgcctgcctgggcccgccctgaaccacccccaactaaagactctggagtgatcactgggtatcgaaaatcagatcaggccagacatggcagctcatggcctataatccctatgctttgggaggctgaggtggaaggatggcttgagtccaggagtttgagaccagcctgggcaacatagcaagaccccatctctacagaaaaatttattatttatttatttgcttgtttgtttgtttttgagatggagtctcactctgttgcctaggctggggtgcagtggcgcaatcttggctcgctgcgacttccacctcccgggttcaagcaattctcctgcctcagtctccagagtggctgagattacaggcacctgccacaacacctggctaatttttgtatttttagtagagatggggttttgccatgttggccaggctggtctcaaactcctgacctcaggtgatccatctgccttggcctcccaacgtgctgggattacaagcatgagccactgtgcccagcctctacagaaaaatttaaaaattagctgggtgaggtgctaattacgggcatgcacgtgtaatctcaggtacttgggaggctgactcaggaggatccctttagcccagcagttagaggctgcagtgagctatgatgatgccactgcactgcagcctgggcaacagagcgagaccctgtctcttaaaaaaaaaaaaaaatcagatcactctttcgcctgacactgccttccactgagcacccgtgaggtggcggaaaccaccattggctctctccccaatctctttccaaaatggctcaatgtagttgagcacttgtgagactctgattacagtataatcacggtctgcctctgaacctgcacccaggctgttccacccgcccagaagcagcctggctgacttccccatggtcaggagtccatttggagagatctccttggacaagactcctttggcataactggtccaggcacccttatctctctttgaccttccacctgatcccaggatggctgtgttgtccatcccactgtctagtggaatgtgtactcctgcagggctgggacgggctccaggcccactgatcaggtgcctgcacccagcctgggggaggccccaagtccatacctgctggctgaataacaagggtccacgggactcacccacctccagccacacgtgctgggctgacgtggggatggaggggatttcaaaccccactagtccacgctgggacacaacttcactggtgtagatgttatcctttggtgtcagctctgccttaatctggaccgtcaccccctcagctgggctgccatcggggtaggatagctccacctagaaaaggtcacccaagacacaacagagttaagacggccatgctccccaaactgatctgcagaatcaacgcaatccccactggaatcccagcaggcttctttgtagaaattgacaaactgctcctgaaattcacagggcatcgcaacgagttccaaatcgcaaaaacaatccttaaagggaacaaaaaagaaggactcacaggtccaggagtggtggcgtgtgcctgtggtcccagctactcaagaggcttccaaggcagacatggaagccggatgcagtggctcacacctataatcccatgtgaggccaggagttccagaccagcctgggtaacatagtgagacctcactacaaaaaactttaaaatttcaggtgtggtggcatgcacctatagccccaactattcaggaggctgaggtgggaggatcacttgagtctgggacttcaaggctgcagagagctatgatggtgccactgcactccagcctgagtgactgaatgagaccctgtctcttaagagaaaaaaagttttaaatgaagttgcatccctacctcacaccatatacaaaaataaactcaaatggatcacagacctaaatgtaacagctaaagctataacattcttagaagaaacataagggtagaccttcatgcccttggatttggcaaagaggtcatgaagtacaaattacatgtgctagtcattagtctgatgccataccagggtatggacagttcagtgtgacacttaaacctcacccattcagactggttggagagccagctagaatgaggcagacatagatgttttaaaaggagcacagattgtagcctctgaagaaccctaaaacagccctcagctgtgcaggtatctggtgacggagtgaaccaggattcagcccacatgatcttcattaaccactccctttttttttttttttttttttgagagacagagtcttgctctgttgcccaggctggagtgaagtggcccgatcatagctcactgctgcctctacctcctgggctcgcaatcctcctgcctcatcctcctgatagctgggaccacaggtgtacaataccatgcctggctaattttaaaaaaaaatctgtagagctggggtcttgctctattgcccaggctggtctcaaactcccagtctcaagcaatcctcccaccttggtctcccaaagtgtgagccacaaacgtctggcctatttctttttattttttgtagagactggatctcactatgttgcccaggctggtctcacacttttggcctcaagtggtcctcttgccttggcctcaagtggtcctcttgcctcggcctcccaaagcactgggactacaggcatgagccaccatgcccagcctaaccactcctttcttgaatgcagatggtaggtattttctgtcatatgtgaaacgctctttaccaaatttgtagccttaaacctcttcttcatacacattctgaccccgcacgaggtactttagtttctactcaagctggggccctcaaagccagggacacaggagatgtgtctgtgcatgggatagaggtggctccaacactggcatggagaagagaaaggaggttccaaagcagaacaagagggtcagaactcagtgttaggacagccagccagcatcactcatggacggcaaaagggaactgggtgcagacagatgcagggccagggatgtggcccactttccccttgcatgacactgggctctgttggccttgccccactcctgctgctgcaattggggtgaagatgccccaggtttgtttttgttttttgttttttgtttttttatttgagacgaagtctcactctgtctcccaggctggagtgcagtggtgtgatcttggctcactgcaacctccgcctccaggttcaagcaattatcgtgcctcagcctcctgagtcactggcattacaggtgtccaccatcatgtctggctaatttttgtattttcagtagagacagtatttcaccatgttggccaggttggtcttgaagtcctgacctcaggtcatccgcccacctgggcctcccaaagtgctgggattatagtcatgagccaccgtgcccagcctaccccagtttaacagttaaaataagaataatgactgggtgtagtggctcacatctgcaatcccagcactttgggggtctgaggtaggagatctgcttgagcccaggagttcaagaccagtctggccaacacagcaagatcccatctctacaaaaaattaaaaaattgactaggtgcggtggctcctgtttgcaatctcagcactctgggaggctgaggcaggtggatcacctgaggtcaggtgttcaagaccagcctggccaatgtggtgaaaccccgtctctactaaaaatacaaaaattagtggggtatggtggggcatgcctgtaatcccagctactctggaggctgaggcaggagaatcacttgaacccaggaggcagaggttgcaattagtcgagatcatgccactgcactccagcctgggcgacagagcgagactcttgtctcaaaataaataaataaataaaaatttaaaaataaaaaaatttgctgggcgtggtggctcatgcctgcagtcccagctacccaggatgctgaggcaggcggattgcttgaatccaggatgtcgaggctgtggtgagctatgatctcaccactgcactccagcctgggcgacagaacaaaaccctgtctctaagaagaaaacatatataaggatcatgacatctggacacctcaaaatttaccgtgcataagacttgagtggtgggtgggaggcagaggctcgttcaaaatgtcacatgggtctgcacctgtcagtctcaggaacagaaggtctacctttgcagggctctcaacttaggtcctcaggggataaaatcaacccagtgaagggccaggagtgatggctcacgcctgtaaccccagcactttgggaggccaaggcgggaagttcacttgaggccaggagttcgagaccagcctggccaacatggcgaaaccccgtctctactaaaaatacaaaaattaactgggcttggtagtatgttcctgtaatcccagctacttgggaggctgaggcaggagaatcacttgaacctgggagacggaggttgcagtgagccgagatggagccactgcactccagcctgggcgatggagtgtgactatctctaaaaaaaaaaaaaaaaaaaaagaacccattgaagaaacaggactgccttagagcagttgctttaataaatggctactcagatgtctgtccaagtggaatagagtagattgtcctttcccgtggaggaaaatgtcccctgcccctcacctggaacaccagccctctccactctccgcaaaggttatgtcaggggatccgttttcagctgagtcaccactgcagagctagtggctagtggtggtggtttcacggtggtccttgggcgggaggcagcacagtcacccccaagttaccttccccacgtaggccaggcccggcttgaactgcttcctcgtgtccttggagtaccggatgtccaccagctgcctctgcacgggggtggagtcatcgaacgcgacctgctggctcccgtccacactggtcaccatggcccagatgctgaccctgccccggaagtgctcagggacgtccgctgggatcatgtccctcacgcagatgtcgaagtcccgggagccgaggatctggagggaggaaaaacacagcccgtgctcactcagggttggagtgtctttgagggatgtccctgaaacacacacctgaggtgcaagactcttcagctgcttggagggccaggggtcacttggtggcatacccaatctatgccacgggaccatgcagagggtccctcactggatctggacaacatcccagggaagatggatgttggctccattgggcagaagaggaaagaggctgggtgcggtggctcacgcctgtaatcccagcactttgggaggctgtggcgggcgggtcacttgaggtcaggagttcgatatcagtctagccaacatggcgaaaccccgcctctagtaaaaatgtaaaaaaatagctgggcgtggtgacaggcacctgtaatcccagatacttgggaggctgaggcatgagaatcgcttgaacccaggaggcagaggttgaggtgagcctgaattgtgccactgcactccagcctgggttaagaaaaaaaaaaagaggaaagagattcccatgctgacacaatctcccacagcccaggcaacagagggggcagctgaacctgctcagcctcactctggggcaccagaactccctcattcaattcctatctcaggatcccaccctgggacttggcaaataatcctcattcagaaagagctgtggagtaaattactccgtaaatgagagaactaagtcaaagaccatcagctggtagcctcccaggagaatggctgggattctccaaggtgccagtgtcaggaatgggaaaggtaggggtttatggtttccaatccatggaagagaagcctcagagagcagagagatgggctgggtgtgatggtgcacacctgtaatcccagcactttggaaggccagcagcggcagatcacttgaggtcaggagttcaagaccagcctggccaacatggcaaaaccctgtctctactaaaaatacaaaaattatcccaacacggtggcacatgcctgtaatcacagctacatgggaggctgaggcaggagaattgcctgaacccaggaggcagaggctgcagtgatccaagatcgtgccactgcactccagcctgggagacagagagagactccatctcaataaataaattaattaaattaaattaaattaaagatatctcagacataagagaggggagcccattggagcagatgtgtctcaggtgggaaagggactgagaaggagctttgggtgggaggtggggaggagccggtgctgaaaggcttaatgtccgggcacctacaaagggatgggaatctccaggaaggtgggtgtctgttgtactgtagcccactcacaatgtaacattatgctgaaagaccaaaaaaggttacaaaactttaaacaggtgggaatataaaatagtgcagccacattgaccatttggcagttcctcaaaaggtcacacatagtgttaccctctgacctagcaattccgctcctaggaaagaacccaagagaaacaaaaatgtaggtccacagaaaaacttgcacagggatgttcatagtagcatgagacataatagccaaaaagcagaaacaacccaaatgtccaccagcggatgaagggataaacacattgtggtccatctgtaccagggaatatgatgcagccataaaaaaggaatgaagcattgatcatgctacgatgtagacaaacatcaaaaacatgatgctgagtgagagaagccagacacaaaaggacatatagcatatgattcattcacagaaatgtccagaacaggcaaatctacagagacagaaaacagatagtagttgccagagacaggaggagggaaatgaggattctctgcaaaaggacatgaaggatgtatggaaggatggtggaacaattctaaaattggataacagccatggttgcacaactctgcaactatatgaaaaccatcaagctgtggccaggcgcagtggctcacgcctgtaatcccagcactttgggaggccgaggcaggtggatcacgacgtcaggagatcgagaccatcctagctaatacagtgaaaccccgtctctactaaaaatacaaaaaaaaaaattagccgggtgttgtggtgggcacctatagtcccagctactggggaggctgaggcaggagaatggcatgaacccaggaggcggagcttgcagtgagccgagatcacgccattgcactccagcctgggcaacagagcaagactccatctccaaaaaaaaaaaaaaagaaaagaaaaccatcaagctgtacactctacatgggtgaattgtatgctatgtgaatgatatctcaataaaattgtttatgtttttattttattttagagatgggatctcactatgttgcccaggctggccttgaactcctgagctcaagagatcttcctgcctctaccttccaaatattaagagctgggactccaggcaataaaattagtgtttattagtgtttttttgttttttgtttgttttttgagatggagtctcactttgtcgcccaggccatggtggtcaggctggtctcgaattcatggcctcaagtgatccgcccgccttggcctcccaaagtgctgggattacgggtgtgagccaccatgcccagccaaattggtgtttttttaactttacttacaataacctgtgaggaaacacatcaaaatatcgatagtggtcatgtccacctattggagaacaagttatctttattttcttcctttttatattttctaaagtctctatattcagcctgcaggaattttatcatcagaaaaatccctgccatataactgttttagaaagtaaaacagcggtggctcacacttgtcatcccagcacttttgggggcaaaggcgagaggatcgcttgagcccaggagttcaagacaagcctgggcaacatagtgagatcctgtctctattcaaaaactttttaaaggcagtaaataaaataataacaataagagaaagtaaaataaaatgtgtgctggtggaggtgaacctgggggttgggtcagggggtagaaggggtccctgtttctcaccttggttgttctgaggacagggcgtcccacctcgtggctgtagtaccctacaccattaacagtcatgttgatcattaaggcaccagccacaggtttcccaaaggtatacctggaacaaaaggataaagcatgctcaatttcacagccaagatggcagggagggcccagcctcaggaaggccaggttgacatagtgtggccactagtacagtgatggatgcagctccctccacaccctgcatcctgtcctgacagccctccctgcagcctggaatcgggacagaagatgccaaggccctccgatcctctgcaccaagcctccagatggacagaaaaagagaccaagggtcagagaggaactctggaactgagaaggctaggttggtgccacctctggagcagagtagtgcagaggcatgagcgactgagaggcacctgagcctaagcgccctattaagctcgactttgaaccaaggaccgaacttctctgagcctgtttcctcacccagagaatgggactcaaactaccctctcaggggtgatagtgaaacttaaatgtctgtatgtcactcctgatgcagagggaatgctggtggatggggaacaggagcaaaatgagagagtgcaggctgggcatggtggcttatgcctgtaatcccagcactttgggaggccaaggtgggcagatcacttgaggtcaggagttcgagaccagcctggccaacatggtgaaactctgtctctactaaaaatacaaaaattagttgggtgtggtggcacatgcttgtgatcccagctactaggagaagctgaggcaggagaatcaattgagcccggtaggcagaggttgcagagagctgagactgtcactacactccagcctgggcgacagagtaagactccgtctgaaaaaaaaaaaaaaaaaaaaaaaacaaggatcaacccctctcgggtcagcacactggcgggggtgctgttggatgccagggaggcctgcagagggcggggagcagccttgggggagaggggaacatggtggggttgggagggtcacaccctggggggtagggcattctttggggaggggagacccttggggagggaagaacttagagtggaagggcaggacttgaggaaggaatacacagcgggagaggggcatgctttggagagacaggggcgtgctcataggggtgaggacaccagcatggaaacaaagacaggcagtgggtagagtgcaagagactcatgtggcagggagacaccgagtactagggagggagcggggcacagggcacccttgtgggagcagggaggccatggaagaagtgtctgcctgtaggaggagggggaagcccggttgttgggggagatggaaggggagggcagaggaggggcccagggggaggaagatgctctagggaaaggggtacactccagggagggggtgcccccaggggaggggcacgggaaaggatgatgctctagcgggtggccacatcctggggaggggaacccacaggggaggagcccagcagggagggagatactttagagggaggaggacaccccagggaggaggcgcccacaggggaggagcctggtggggagggagatactctagggggaggggcacctcctgaggagggggcgcctactggagagagtcacaggaagggagatgcactaggggaggggcacaccccagggaggagggaaccaggaagggaggggcacacccatgtgggagggagggaggcagcagaggaggggaacgaccttgagggagcagcgtgatggttggggaaggggaagggcccccccagtgtgccccaggggtccctctttctcacctggcccgcacagtgcctgtctcacaggcgtccaggtcttggatataccggggcgggtcaatcagaagctcaaacttgggcaacactgaagaaagcaagcagagaggaggggctggcttctgtccctaaggtggcctcaggagccctgacaccggtgcaaggtgtctgaggaccacagcacctggccaccaccgaggttgacactgtacccatccacaccactctgctgagcagccctggggattttgtgggctgcatctatttctcatctttgggggactaggaccccattttcctcaaggggcctcccctgtcacttttagaccacgtgcttagagtgtggcggattccagcctatcccagggtggacacgaggccaggaggctcctcctagcccctgtgtctgtgcatgggatagaggtggccctgggagccaacaaggggcatccccagggtgactgcaacagagagctgatttctccatttgcttctggactcagccctgggagtatcaagccatcttgtcaccaggggcggaggtgacaccctggagcagccggtaaaccagaaagaatcgggtcctgagagaactcttgtaggagcctaagaatcttttcgttctttcttttcttttcttttcttttctttttttttttgagacagattgtcactgtgtttcccaggttggtgtgcagtggcacgatcttggctcactgcaacctcctcctcctggttcaagcaattctcctgcctcagcctcccaagtagctgggactgcaggcacatgccaccacgcctggctaatttttgtatttttagtagagatggggtttcaccatgttggccagcctggtcttgaactcctgacctctagtgatctacccacctcagcctcccaaagtgctgggattacagacgttagctgccatgcctggccacctttttttttttctgagacagggtctcactttgtcacccaaactggagaatagtggtgcaatcacagttcactgcagccttgatctcctgggctcaagcaatcctcccgcctcagcttcccgagtagcggggactacaggcacgtgccaccatgtccagataattgttttaaagttttatacagacagggactatgttgtccaggctggtctcaaactcctggcctcaagcgatcctccagcctcagcttcccaaagtgttgggattacaggtgtgagccaccaccatgcctggcctacaatacttttttctataaaaggcaagagtccactttgggaggctgaggcggaaggattgcttgagaccaggagttctagaccagcctgggcaacatgacgaaaccctgtctctactaatacaaaaattaaccaggtgtggtggctcacacttgtagtcccagcaactcaggaggctgaggagggaggatcacttgaacttgggaagtcaaggcttcagtgagccaagatcgcaccactgcactccagcctgggtgatgggtgtgaaaccctgcctcaaaaaaaaaaaaaaagtaagagtgtaggaccatcccctgaaactatacccagccatcatgagccctcagtaaacggggactcatgtcatcctccacctcttcactgccatcttcaccagtttccttttctttttctttttttttttgagacagagtctcgccctgtcgcccaggctggagcgcagtagtgcgatcttggctcactgcaacctctgcctcccggttcaagtgatactcctgcctcagcctcccaagtagctgggaccacaggtgcgcgccaccacgcccggctaatttttgtatttttagtagacacgaggtttcgccatgttggccaggctggtctcaaactcctgacctcaagtgatccgcccacctgggcctccgaaagtgctgggattacaggcgagagcccttgcacccggccttcttcaccagtttctaaggtttctcccagatctgaaatcccaagaccctgagattctccaacttaccatacttctgaacttcaaaagacttgttgtacgcgtggccttgcatttcaacaaaaatgaaccattctcccaacacaggctggtcggacaaggggaagctcatgttggtgatgcctgtgtgaagagagagggcaagggctttttcagagagccacagacacggtgaggtacgggaagagggagccaggaccctgctccttctccttccctgagcagccccccaggagaactggagaccacagagaagctggcggggtctgtgcagagcagcaccctgtaggatcaggccagcggagcaggtttgacaccccggcgggcttcgaagggatgcaggaagggactggacccgcggttcccgggacagccttgcagccagggccaggggcaggcagtgagctggacaaacgagggaaatgagccagcccggctcattcactccatcccccgccacccgagtcatttccagcctgggcactactgacacctggggccacgtggctctctggggtggaggtgtcctgtgagctgtaggatgctgagcagcacccctggcctccacccaacagatgccagtagtaccaatgccccccacaatataacgacctaaaaaagtcccccagatactgccaatatcgcccctagggggcaaaatcacccctgggtggaaatcccagagagagagagagacagacagagagagagagagagagaaacagacaagacagacagggtctcctgccaggatagggtttctcagcctcagcactactgacatttagggccagatcattcattgtggtgtgggggcatcctgtaaactgaggggtgctgaccatcatccctggcctccactcaccaaaggtcagtagtaccaatgccctctacaatataacaacctaaaaaagtcccccagacattgccaatatcgcccctagggggcaaagtcaccccttggtggaaatcccagagcactgaggggtgctgagcatcttccctggcctccactcaccagatgccagttgcaccccttgtcctccacaaaagtcctgacaagccaaaatgtccccagacattgccatgtcccctgggggcagaatcgcctgtccgaccccccacccctccatgagaaccaccccccaactgaactagagcacgcacacactttagaacagagcactctctccccaaacatccccccagaaacaccatcagccgctgacatgggagctgtcatttgctttgcgcctgtgcctctgagccccgtccgcagctgttttcactgggagccatggaggagttggaaagggcacattgactctaggcagtgccaggggatcttccactcctgagtgtgacacgctccactcgtccccaatgatcatatggggagggccatacagggaagggacagggagagtggttcccctgggtctcacgacagaaccgaaaacccatagcggcgcccacggcttctctcaatcacattggagtcagaagatgtgatggctaaaatggctttttccccctcatattcaggcaaagtgggcctttgatggttacaggacattcggggatgtgtgtcctgagcacgtgttttgtaaggggtctgtggccaactttgccaagtgctccctgagagaggggcacagtcaccctggttgagaatcatgggtctacacacatcccaaagggttttttttttatttttttgagacagagtcttgctcttttgcccaggctggagtgcagtggcatgatctcagctcatgcaaccttcactcccgggttcaagagattcttgtgcctcagcttcctgagtagctgggactttaggcacccgccaccatgtccagctaattttgtatttttagtagagacagggtttccccatgttggccaggctggtcttgaactcctgacctcaggtgatctgcccgcctcagcctcccaaagtgctggcattacaggtgtgagccaccaagccaggcctcaaagggtttttttaaacaggaggttgacctcttccccaactctgtgctcttaagatcaagtcagcctaggcaacatcttgagaccctgtctctaccaaaaatttaaaaaattagctgggcttggtggcacgcgcctgtggtcccacctacttgggaggctgaggtgggaggatcacttgaacccaagaggtagaggctgcagtgagctatgatcacaccactgcactccagcctaggtgacagaatgagagagaacctgcctcttgagaaaaaaaaaaaaaactttttaaaaaaagatcaaatccattctcttccctggctcttgccagtgtcacccctgctctcagcactcaacatctctctcctgtcccccatctccaacctcactaccctagacatccacagcccttcccataagttgactccctgcctgggagatgcttcctggcccccttgctttgcctggctgtcccccgttccttctttgttgctgaaaaggatcctccttcaggcagccttccaggattgcctctgccaccccgggctgggatagagccccatttgccatctctgagttttgaacttctccttcctagcactcatcacaactgacattatccaggctgtttagttcatgtttgcttcccccattgggttgaaagctcaccccatggcagtatctatgtggcgcccaacaaatagctgctgatacaaagacagcaatcaagggaacgagagggagtaaagaaggcagacagggaagatggaacagaagaaaagaggctgaggccaggcacggtggctcatgcctgtaatcccagcacttttccgaggccgaggcgggcggatcacctgagtttgggagttcaagaccagcctggccaacatggtgaaaccctgtgtctactaaaaatacaaaaattagccaggcctggtggcacgtgcctgtaatcccagctacttgggaagctgaggcaggagaatggcttgaacccgggaggcggaggtggcagtgagccgacatcgtgccactgcactccagtctgggtgacaatagcaagactgtattttaaaaaaaaagaagaagaagaaaagaaaaaggagaaggaggaagaagaagaaagaagaaggaggaaggaggaagaagaagcaggaggagagggggaggaggaggaggaaagaagaaggaagatcgaagaagaaggaggaggaggagggagaataagacgaagagaaggagaagaagaaagaacaagaaagaaggaagatgaagaagaagaaaagaggctgagacccaaggcaggagacagaaggaggaagggtcaccaacagacccccgtgatcctgcctgtggctctactgttaccccatttctggacagcctgggtgtgtgcatggccatccccagactccccacaccctacctatcccctgccctctcctggggcatcacacccctcacaggcaaagcaaagtggggtatgtcaattacacagtcttcctagtcataggaaaagaaaagaaaaaagcaaagtcctttctgacttctagctggaaaagaaatatctcatgcaatggggatgataaaatctgcaacctatagcaggaagaagctgggagcaggccgggcgtggtggctcacgcctgtaatcccaccactttgggaggacaaggcgggtggatcacctgagaggtcaggagttggagaccagcctggccaaatggtgaaaccccatctctactaaaaatacaaaaataagccaggcgtggtgccatgcacctgtaatcccagctactcggtaggctgaggcaggagacgctcttgaacccgggaggcagaggttgcagtgagctgagattgtgccactgcactccagcctgggtgacagagagagactctgtctcaaaaaataaaaaacaaggtgagagcaggtgccccagtattccacaaaggtcttgagttctgagcaggagccccgcctgagtcctgggcatagagaaacgtgggcagagggtccaaatccacagggaaggtgctgtgggctgggctgaggctcccagatccaaacccatggcattgtcacctcccaggtgggtacctgccctccgctcctccttggtcccctccagctggagcagcagtgggggtacattagcggtgggccctggacagagcatattctgttttcctggaaggtttatcacatctgcagcccccaagccgcagaggaagaaacttaccgcagcagaacggctttaagtgtctccactctatcatccgagagcctcgggggtcctgttggtggtggagggggacagacacacggagtgaactcaggctagcctagcatgtgcccaatgtaaggattttcccagtcctctctcttgggcatgtcaaccatgcagcgaaggtcccaagattaatcattaaccccggggcaaaaaaaaagctctggatagagaaggatttgaaaagcagaaggggatgggctgggcctacctcctcatttagggagccgtgtacaaacctagaaatggacgtggctgggtgtggtggctcacacctgtaatcccagcagtttgggaggccaaggtgggcggatcacctgaggtcaggagtttgagaccagcctggccaacatggtgaaacccccatttccactaaaaaagatacaaaaaaaaattagctgggtgtggtgccatacgcctgtagtctcagctactcgggaggctgaggaaggagaatcgcttgaacccgggaggcagaggttgcagtgagccaagatcagcaccactgcaatccagcctgggtgatagagcgagactccatttcaaaaaaaaaaaggaaacggacagacacacacacagcccatcccagggcggacccagggaccaggatagaagaggccaggtcccagccttgtaaggcacagcggctcaacccagaaggcagacagtgagcgaagacagaccagatcttgcagaaggtgggctacccgggccccaagtccaagccgaggaaggacagaggccactcaccaggatgtaggcttccagctgtaatgaagacacagatgcagtgagcaaatcttccagcaaaccccaaaccctttcaacatgctcatgcatggcctcggtccccgggacaggcagtcgctgttatgggttaaacagtgtccccctagattacatccgttgaatcctaaccccaagtagggtctttagaaagactcattacaggtggctcatgcctgtaatcccagcactttgggaggccaaggcgggtggatcacgaggtcaggagattgagaccaccctggctaacaccgtgaaatcccgtctctacaaaaaatagaaaaaattagccgggcatggtcgtgggtgcctgtagtcccagctactcgggaggctgaggcaggagaatggcatgaacccaggaggcagagcttgcagtgagcggagattgcgccactgcactccagcctgggtgacacagcgagactccgtctcaaaaaaaaaaaaaagaaatggggaaaccaggcaggcactacttgaaccactggaccctgttaatgtccccagcaacacgacaaacccatgctgggtgcctcctgatacaaggcaccggggaggatccagtattgcttctgtggatcctgcccgagattcacagactgaacttggtcacaaggaaccaggagaccatcctaccaaggggcgttctgcaaaacaactgcctggacttgccaaaaatgtcaatgtcatggaagacacagaaaggcagtgaggaactaattcaaattaaaggagaccaagagacatgatgatcaaatgcaacaaatgacccacgatcagatcctggaccagcaaagaaacatgctataaaggttactattggaacaacatggattttatattagatattattattgtgtcaatgtcaaaattattttcctcctcttttttttttggtttttcgttttttgtagagacagggttgtgctttgctgcccgggctggagttcaagtggcacaatcacagctcattgcagcctcgaactcctgggctcaagagatcctcctgactcagcttcccaagtagctgggactactggcacatgccaccatgctcaactaatttttattattttaattttttgtcaagacagtttcgctatgttgcccagaatggtctcggactcctggccacagcgatcttcctgcctcagcctcccgaagtgctgggattacagatgtgagacactgtgcccagcctcaaaatttttaaatgtgatgatcctccttgagttgtataagagaacgtccttgctcttaaaggatacaggccaagtgttcagggccagagaggcacagtatctgtaagttattctcacattatttaccattaaaataattttgtaagtatatatacatatacagacagagagagagcgctagaaagaaagcacataaatatagccaggtgcagtggctcacacctgtaatcctagcactttaggaggctgaggcgggtgtatcacctgaggtcaggagtttgaaaccagcctggccaacatggtgaaaccccatctctactaaaaatacaaaaatcagctgggcatggtggcacacacctgtaatcccaactactcaggaggctaaggcaggagaatcgcttgaacccgggaggcagaggtcgcagtgagccaagatcgcaccactgcacttcagcttgggtgacagagcaagactccatctcaaaaaaaaaacagaaaaaaaaatcagccgggcgtggtggtgggcacctataatcccggctactcgggaggctaaggcaagagaatcacttagaacccaggaagcagaggttgtagtgagccgagatagtgccactgcactccagcattggcaatagagcgagagactcggtcttggggaaaaaaaaaaaattaagcaacagtccagggctacctaaagccctcaaaggcattccttgttgaggggcagtgggccaggcacgcccaccagccttcctctgtcacaaagaactccctggggttctccgggggacatgaaacaaccatgaaagaaaatagaaaagagaagttctggagagaaagacccgtttccgatggtggccctggccaggtagtcccaagtgggtgcactccgggcccgcggttttagaagctgatctcaccttctcgttgacaggcctcagatttggagagacggtgaagatgcttatgagcactagaagaaagaagagaggcgtgtgacacctccagaccatggccggccctccctgcatccatgctggccactcacctcggtgctggggtctgtacacaggcttgtccgtctggatgaatacagaagcgccccggccgtccacggtcaccgaggtctggttgtgaaagaggggcccctcctccgcctgccagccgcggccccacactttcagaagcgcttggccccggaggcccgtgggcacctgcaggcagaggaaggagctttgggacaagaattcaccctggaatgggccaagatactggggaaggagtttggaggcctggaacagggggaactcaccccaggagtgactgtgccccagggggacacttggcagtttctggagatgttttggggtgtcatagctttgggggtggggattgctactgtcacttgagaggggaatagagaggctgctcaacatcttacagagcacaggacacccccgcccttggcaaactgccccaaatatctttttttttggagacaaggcttactctgtcgcccaggctggagtgtagtggcactatctcagctcattgcaacctctgtctcccagctcaaatgattctcccacctcagcctcctgagtagatgggattacaggtgtgtgtcaccatgcctggctaatttttatgtttttagtagaaacggggtttcaccatgttggccaggctggtcttgaactcctgggctcaagcaatccatctgcctcagcctcccaaagtactgggattataggcgtgagccattgcacccggccatatcttttttctttctttctttctttctttctttttttttttttttcaggcagggtttatctctgttgcccaggctggagtgcagtggtgcaattatggctcactgcggccttggcctgctgggcgcaagcaatcctcccatctcagcctcccaaagagctgggactacaggcatgcaccaccaagccaggcttattttgtttatttttggtagaaacaaggtctcactctattgcccaggctggtctcaaactcctgggctcaagcgatcctcccacctcagcctcagattacagacgtgagccactgtgccaagcctgccccagctttcagccatgctgaggctgagaaacactggtctagttatggagccttctcttctgactcaacagagttgcaaagctgttttctgtcatcatcactggagagttacaagaactgtctcccttcttgccaagtgaattcacagcctgtgagcggtggaaggagacctggatcccttgatatacatatgtacatgtccagatatatctatcatgtatatgtgtctgtgtttgcctcactctaaaatcgcagcacaggctgagcgcaatggctcacacctgtaatcccagcactttggggaggctggggtgggcggatcacctgaggtcaggagttcaagaccagcctggccaacatggcaaaaccccatctctactaagtacaaaaattagccagctgtggtggtgggcacctgtaatcccagctactcgggaggctgaggcaggagaattgcttgaacccaggaggcagaggttgcattgagcccagatcgcaacattgcactccaacctgggtgacaagagtgaaactccatctccaaaaaaaataaataaacaaataatacaaataaagtcacagcacaagccaggcgcgatggctcacacctgtaatcccagcacttcgggaggccgaggtgggcagatggcttgaggccagaagttcaagaccagcccagccaacatggtgaaaccctgtctctacaaaaaatacaaaaaaaattagccaggtgtgtgtcaggcacctgtagttccagctactctggaggctgaggcacaccaatcacttgaacctgggaggcagaggttgccatgagctgagatcacaccactgaactccagcctggatgacagagcgagactccgcctcaaaaaataaaataaaataaaataaaataaaataaaaatcacaacacatatatagtgcatgactccattgatctgaattgtccagaaaaggcaatccacagagacaggaatcagatgggtggttgctaggggctgggagaagggagtggggagtgactactgatggggacagggtcttcttttgcggggataaaaatgttctggaactagatgggggggcattgcacaaccctgtcaatgtagtaaatgccacggaattatatgttttagaatggttagatggcttttttgttggtttggtttgtgtttttgccacacagatgggagaaaaaaaaaaaccacttcagtcttcaggatggagcctacactacacaattccttccttccttccttccttcactacacattccctccctccctctctccctccctctctccctcccttcctttctttcttccttccttccatccttcctacactacacattccttccctccctccctccctccatccctcccttctttctttctttctctttctctttctttcttttgtttttagagacaatatcttgctctgtcgccagactggagtccaatggtgcgatcagagctcactacagcctcaaactcctgggctcatgcgatcctcctgcctcagcctactgagaagccaggactgcaggcatgcaccaccatgcccagctaatttattttattttattttttggtagagatggggtctcactatgttgcccaggctgggctcaaactcctgggctcatgtgatcctcccgactcagcctcccaaagtgctgggattacaggtgtgagccatggcacctggccgtcctcttatttttttttaagcagatgggcagaacgccctggcatgtgagtcatgcactataaaagctcctttcatgcttaaaacaaacaaaagtaatgcctcctgtattagtctgttttcacactggtgataaagacatacccgagactgggtaatttataaagaaaaagaggtttaatggactcacagtttcacgtggctggggaggtctcacaatcatggcgaaaggtgaaaggcacgtcttacatggtggcaggcaagagagaatgagagccaagcaaaaaggggtttccccttataaaatcatcagctcttgtgagacttattcattaccatgagaacagtatgggggaaaccaccccatgattcaattatctccctctgggtccctcccacaacgtgtggaaattatgggagctacaattcaagatgagatttaggtggggacacaaccaaaccatattacctccctctatgtgaccggtatttgatgatagttaccctctcagccatccctgggcacccagcaggtggacattacctccaagcagatcacctggggagctatgtgcacccacctgttcctaaaaccacccaaatggctgggcacagtggctcacgcctgtcatcccagcactttgggaggctgaggtgggcagatcacctgaggtcaggagttcgggaccagcctggccaacatggcgaagccccgtctctactgaaaatacaaaaattagccaggtgtgatggcaggcgcctatagtcccagcgactcaggaggctgaggcagcagaatcgcttgaacccagaaggcagaggttgcagtgagctgagatggtacagctgcactccagcctaggtgacagagtgagactccatctcaaaaaataaaaaataaaaaaaatgtaaaaataaaactatccaactgtggggtgttcctcttctgaggacccctatgtcagcatctactcatgtggtccctcaaggggtggatggaccctggtgaccatcacggggaacaatctaccagattatctgactgatcatcacagttctgcactgtcatgaccattgtgtgggtgaggtcggggtgcactaggacccccgctctctgaagccacacggggtccgtcccagccctctctccagccacccacctcctgtctgctctgaacagcctcagagggacctctcctacctgccacccgcaggaccagccttctggacctgtgaggtctcttctgactgcagtttccccgtcaagaccaaccaaagcaataaacctcacccactactccaatcccaaaatcctcacctggccctgtttctggaaatatctcaacactggccagaggctgaagagggaggaaaggtcccggccacccaagagcagggcaaggatgggcaggagggagataccggaggtgctgaggaccgtatgctggagggacagggaggctggcgggcaagagactatgctgagcacataaagggggccgaccccaaacggcagcccctagagcttcacaccttcccagggaagaggatgcctcccacagggagagaaggcaagaaggacctccagccttctttccgtgtttaaagacaggctcttgctctgttgcccagactagagtgctgtggtgcgatcacgtctcactgcaacctcgatctcctggactcaagcaatcctcctaccttggcctactgagtggctgggactacaggtgcaggccaccatgcccggctaattttttattttcagtttgtagagacaggggacaggctctcaactatgttgcccaggctggtctccaactcctggcctcaagcgatcctccagtttcagcctcccaagtagctaggattacaggcaccagtcactgtgcctggccaaatgctaaggatcttaagcatctttcttgggaatctcaagtctagtcttaagagcccttggcccctctcccagaattatacaaccctttgttagtctctcttacaaattcccagcatctgtgctgtgaagagtgtcttctaacgtgtggtggccagggactgcacatcatcttaacacctgctccagggaaatggcttcctgactcataagaaagcagatctaggctgggtgcagtggctcacacctgtaatgccagcactttgggaggctgaggcaggtggatcacttgaggtcaggagtttgagaccacagtagccaacatggtgaaaccccacctctattgaaaatacaaaaattagctgggcatggtgggggcgtctgcagtcccagctactcaggaggctgaggcaggaaaatcacttgaacccaggaggcagaggttgcagtgagctgagatcgtgccactgcactccaccctgggcgacagagcaagactctgtctccaaaaagagagaaagagagagaaaaatctaatcacacaaaggaaaggcaggagagagagagaggaaggaagggaggagggaggaaaagaaatccaatcacaggaagccaggaaagggagttctagggtctttttttttttttcttttttccttatgcttctgtaggcattgaagccctagggcagggaccctcaacccctgggccacagactggtaccagtcaatggcctgttaggaatggggctacacagcaggaggtgagcagtgggtgagcaaatgaaccttcatctgtatttacagccgctccccatcactcacattactgcctaagctccgcctcccatcagatcagtggtggcattagattctcataggagtgtgaaccctattgtgaactgtgcatgggaggggtctagattgcatgctctttatgacaatctaatgcctgatgatctgttactgtctcacatcacccccaggtgggaccatctagttgaaggaaaacaagctcagggcttgcactgtttcttcagttatggtgagttatatcattatttcgttatatattacagtgtaataataatagaaataaagcacacaataaatggaatgcccttgaatcatcctgaaaccatttcttctgctccctggtccgtggaaaaaactgtcttccatgaaactggtccctggtgccaaaaaggttggggactgctgctctagggttttggttcagggtttcctgaatgtggacttctggggccacatccttctttgctgtaagggatcctgcgcattgtaagatgttgagttgcagctgtggcctccacccaccagatgccagtagcacctggcaccgcccagccccaacccagctgtgacaaccaaaaatgtctccaaactttacgaaatgtgccctgtagggcaaaagcccccttgagtgagaactgctgccttagagaaagggttctatcatcaaatgtaatggaggggccaggtgctgtggctcacgcctgtaatcccaacactttgggagggctgaggtgggcagatcaactgaggtcaggagtttgagaccagcctggccaacatgatgaaaccccatctctattaaaaatacaaaaaaattagctgggcacggtggtgcacacctgtaatcccagctactggggaggctgaggcaggagaatcacttgaacccaggaagcggaggttgcagtgagccaagattgcatcactgcactccagcctgggagaaaaagcaagactgcttaaaaaaaaaaaaaaaaagtaaggcaggaagaccactgtcctgcagcaaataggcactagtggtatacctcatacaaaaggaactatctcagcctccattctgatcaatggagatgggcgccttataatttaaaataattctcaatttagcccattcattcgtagactcctttgagcatgtggtaaaagttaaggaatagctaaccccccaaatgccgcaattccagggcttacataatatctgaaatccaaggactccagtttgaaaacccatgtcataaaattatttacatagtttggtacatataataatttaaaaataacaatattcaatgtctgagaggcagtggagaaatctgatccctaatgtactgcaggtggttccatgaacaggtactgctgtgtattccaggacacagcaagacccagtgagaggcttgggtcctgctggtaattcttcaatttggctgtttagcctaaagaaggcatccagaatgctaatatggctttacatacaaacattctggcgacttaaggattacagtatcaaaacactgaaaacagcccaggcagggtggctcatgcctgtaatctcagcactttgggaggccaaggtgggtggatcacttgaggtcaggagtttcagaccagtctggccaacatggtaaaaccccatctctactaaaaatacacacacacacacacacacacacacacacacacacacaaaattagccagtcttgatggtgcatgcctgaggtcccagctacttgggaggctggggcacgagaatcgcttgaaaccagggtcagaggttgcagtgagctgagattgtaccattgcactccagcctgggagacagagtgagacttcatctcaaaaaaaaaaaagaaaaaaaaaaccactgaaacaatctagaaaaaatctagctgggggcttagcaaactgatatttaagaggggtgcaataggatgctgcttacaatgaaatggaaattccaattacagagacttggaaacatggaagttgtttacaacagtgtgataagagggactaggaaacaccacggtgttttgttttcttttgttatgttttgttttgttttgttttttgagacggagtttcactctgttgcccaggctggagtgaagtggtgagatcttggctcactgcaacctccgtcccatgggttgaggcaattctcctgcctcagcccccgagtagctgggattacaggtgtgcgccaccatgcccagttaacttttgtatttttagtagagatggggttttgccatgttgaccaggctggtctcaaattcctgacctcaggtgatccaccctcctcggcctcccagagtgctaggattacaggcatgagccactgcgcccggccagtggtgtgtgtcctttaactgaaactatgaaaagaaaatgtatgtgcatgaacaagaatgtgtggaaaacatgaaaaagtgaaaagtatgaaaactggattatcggtggatttctccttttctaaatttcattattctctcatttttttttaaatagggcctcactctgttgcccaggctggagtgcagtggtgcgatcatagttcactgcagcctcaacctcccagtctcaagcgatcctcctacctcagcctcccaagtggttgtgagaacaggcgtgaaccaccatgcctagctaatggataatttttgtattttttttttttgtagagacaggattttaccatgttttccaggctggccttgaattcctgggctccagagatcaacccacctcagcctcgcaaagtgctgggattacagatgtgagcatggcacccagcctcattattcattttttacatctcttttttaaaaatgatttttctcacaacacatgcaatttctcttattccatcccaattcaattcttttttttttttcttttctttttttttttttttttggtgagacggagatttactcttgttgcccaggctggagtgcaatggtgcaatctcggctcacagcatcctccgcctcccaggttcaagcgattctcctgcctcagcctcccgagtagctgggattacaggcatgtgccaccacgcctggctaattttgtatttttagtagagatgcggtttcaccatgttgcccaggctgatctcgaactcctgacctcaggtgatccacccacctcggccttccaaagtgctgggattacatgtgtgagccaccacgcctggcccaattcaattctttatttccaaggtcaggtttatgattttaaaaatcaacggcttaccttgagtttgattgtccctttatctaaaaatgaaaataaaatgaaaaaagttaaatcaagagctgtgttgccctgcctccctgagctgcagcctcacaaaccacaaactttcttaacccaaaggggtttcatgtggacaaacacaccctgggtcatgctggcctggactgggccaggctaggactggcagaagccagaggtttcctccaagctggcacaagctgaaggccagagggaatggacaaagctgagctattcagggcaaagctggcctgcctaagtacttgatttacttcacccctggctcctgtccaaactaagctgtgaggggagtaatgggaaaacaccaggggagaggaacaaggagaagggtggagagaaagaagaggggactgaggtccccagtggacctgactgttctcccatcacctctctctgctacccacactaaatcatttgtgctactgtactaggtttctggcctccaggactcaattaggtatctattatttttgcctcccagcaaccattatcccatttcctgctaacagatcctcaatttccttggacaagctatctgcccagcacacaacgcacgtggctcccaagctctccatccaccttcctgggactctgagccaatctgcataggccttccccctggtcacagtgattggttcagggctgagcacatgacccaaaatgaaccaatcagcataggccttcccctctggtcatagtgattggctcagggttgagcacatgaaccaagataggccaatcagagggaatcctgggactttatccagccatcttgggagactggtgcttcccctgatcttaaggagagacctggttgcatcaagaggtagggggagaagctggccagcaataccagtggactttctttctaggtatgagagaccacaaactgttgcagaagccaactgggttgggtttcagttggctagccacccaagtcaggagtgcctggttcttctaggactagaagggcttctagaaggttctagaagcttccacatttccaccttctctggccacacctccctaagagacaagtgctgcttcactggccttggagcccctggccttctctgtgtctcctgtggctacatcattctcggcatgaggaatgagtctacctcccctgggagattacagctttctgagccagggatctgcattcactatcttgaccaggaggctgaggctgttgctgtctgcatttgaccaaggagtgaaggggagagactggctgagggcctgagctgcacttagtaacaggcctgtgagcccaggtctgagtctaatggttcaggtgtgctggaaacccaacaaaaggtcagaggggggtcatgtgatctccttcaggtcccctgtcccacctctggtcaaagctgacacaggtgggtgcccgtgctctgcccagatctgcacccacagaaccagggctgctgaggacccatgagctgagctgcccatcctgggctttactctctctccatctgtagaatgaggagaatgcaacctgtcttccctccctccctcccatgcccctggggatttagggcagaagggaagcaaagcaacacccacactgccccagccctgaaggccagcaagtggctccactttgcaaaagaaggggaagtcctggtctggcacccaagggacctacccaggatggctccctggctctgcaccaccggctcaccctgggccaccagctgagcctggaccgtgacttcccttggagagttaaagatggtcacgctgatgacttcctccacgcccgcgcgaaaaacagagggagctgcaatcaagtaacccctgcaggaaaggagatccgaggtgaagttctcaccccagacccctggtctcgctgccaccacagctaggtcagggctctcctcgcagcagactcctgccttttgctgaccacacctggctggcattgatgctctaggagtctgtgcccccccatcagttcttgagtccatggattggctctttcacctgtgaagtccccatgctgggtaagaatctggcctcactggatttttcagcattgcacaacccctcttactctctctattccggcctccagcctgttgactcagctacttccttctgccccaggacctttttttttttttcttttcctggagacagagtgttgctctgtcccccaggctggagtgcagtggcatgatctcggctcactacaacctccacctcccgggttcaagggattctcgtgccttagcctcccaagtagctgggattataggtgcctgccaccacggccggctaatttttgtctttttagtagaggcagggttttgccatgttggccaggatgatctcaaactcctgacctcaaatgatccaccctcctcagcctcccaaagttctgggattagaggtgtgatccaccacgcctggcccttctggcccaggacctttgcacatgtcatgcccactgtctgaaatactctcctccacaagccaggtaaccggcaggatcccacttcatcctcacggtgcaccccgtcccccaccaccgtgagaagtgctgacatcagccccatttagaaagtcagaaaggaaaccccagagaagtcaagtcaccagccgcaacagtgacagaccaggattctaactcaggcggtcagactccaaaacctgataaaaagaagcaaagggcttctttgcaacattcattttaagaacaaaccctgaaaacaaaccatagggcctcaaacaaaaagagctctgaaaacaatggaatcaaagcaggcctctctttcctaaaatcttctgattgactatgaagtcacctctggaagggaggcattacccccagtttccccatgggaagttgatgcttcagaagaataggaacatgcaccagatcacacagccaggcagaagagggcactgaggtgcccttaggggacctgacctgagggcccaggtcctccccacctgagctcctgtctcccagtatctgcagccttccatggaaaattacaaaggccctgtaacctcatgaaatgcttacagtgtccccacaatcaccaagagcattatagcaaaggcaccacaattgcaaccatgtagaatgatggaaatcagaagaaaagagggtaaagggggaaactggaccatgcaatgagattaggagacattttcatttcaatattttctttttttatttttatttatttatttatttatttttaattgagactgagtcttgctctgttgcccaggctggagtgcagtggtgtgatctcagctcactgtaccctccacctcccaggttcaagggattcttctgcctcagcctccagagtagctgggactacaggcgtgcaccaccacacccagctaatttttgtatttttggtagagactgggttccaccatgttggccaggctggtcttgacctcctgacctcaagtgatctgcgcaccttggcctcccaaagtgctgggattacaggcccactgcacctggcctcaatagtgtctctagaacaacccaacatccacatgcaaaaagatgaattgagaacattacctcacaccatgcaattagattaactcaaagttaatcttagtaacagatctaaattgaagaagtaaaacttgtagaaacactagaagaaaacaaaggagaaagtcattgcatgcttagattaggcaaagatttcttgagtaagataccaaaaataagatccataaaataactcactgataaaccaaacttcatgaaaacatcattaccaattttgcatctcaaaagacgcagtgggtttgtgttgtttcatgcacacgaacaatgggtttgggttgtttactgcagccctggccacagtgtgcactgaccctgtgatcatagtgtgctacatctgccttgaataattaccagagttcagtcccctgggatcacacatgtgctgtccaactctaggaccaactggagtttgcaagaccctgggtatgtgctgtgtattacataactccagcactgaccaggacatgcaattaccctgtccaggtgtcctgtccagctccagcactggaatgtggcatcctttaaaaggggaatactctttctgtctggctcccagctgatccctagagtttagacgggcctcacatatagtacatggtgagtgtagaagagagagtaaggaatacgtgttcattttgcttggtcacctttgaaactcctgacaatacgggttcaagtcttcatccaactgcccagagaaactgacatcaccaaattaagtttccctgccattcagaagttgcagctgtttccagctgttgggatgcttgccagccattcactgtcacacctgacccacccctagcatctgggccaacactgcttctcatcctgctggtctcagaaggtcccagattggggaaagggatgtctgggtcagtgtagacagaattgctcttacaactgcaaactgtgctgctttctgggatcagagattcctcacacaaaaatctctcaggtgacagaagtgggcatccagagctattcctaagacgagatcctttgggctgggtgaaccatgcccctggcttagaggccagctaatctggaatcccaggtcggtcatttggggacatctcttccccagtgtgtctctcagcacagggattccatgtcacttaacagatggtaagatcacagggtgactttagtcagaggaaaacgccctggagaactgtttaaaactctctaacgggccaggcacggtgactcacgcctctaatcccagcactttgggaggcggaggtgggtggatcacctgaggtcaggagttccagaacagcctggctaacatggagaaaccccatctctattaaaaatacaaaaaattagccgggtgtggtggcacacgcctgtaatcccagctactcaggaggctgaggcaggagagtcatttgaacctgggaggcggaggttgcagtaagccaagatcgtgccattgcactccagcctgggcaacaagagtaaaactccatctcaaaacaaaaacaaaaacaaaccccaaaaacaacaaacaacaaacaaaaacctctgtataaggcagggtctctcattggagccaaggtctgtcatgtggggccgcgtcattccttgcagtggaagctgacctgcacatcgaaagctgtttaccagcattcctggcctgcacccacttaatgccaacaccaaatgcctctccctatttgtgacaaccaaaaatacctccagacatttcccagcggcctcagggagacaaaaatcccccccagggctgagaaccactattctaagggatgccagctttgaaagaagcattaggatgaaaatttgtagggttccgatttcacgaagcctaggagagggaagtctggatgctcagagcgcagtagactgtcttgcttttaaaactgtgaccagcaaggaccaactactcactgcaaataacgacacccacctagtctcactgcttaccagttttctggaaactcctaaacaagggctgcttgaacaagccgccttctaaacgcccagctggactaaaaggctggtcttgtgcagaccagggcagcccccctgaacccgcagccctgcagagctcacccgaacttgccaggtttagaaatattctctgtgaagccaacttagcagtactccccagcagttagttaattcaccttctccccgctgtcaacccaccagaagcctgcaagcaaacctctagaaaaatgtagaagcaaaacaaacacttcctcctccctcaccacgcccacccacgggaaagtgccccttcgcactctcctcccacttctcagccaagacgctcctcttaccttcataccttggacaactggaaatcgccacccatgatgacagcccgggtcacacgaagggggcgaggtggggcggggggagctgacctcagcacctttagcttttgggagtccctgtacctccacagagccacttcggaaactttagggcgccccctcctcaagacgattcgggaacaagaggccaggtccagcccagcgcggaggctgtgtggccttgggcaggtcgctgcaacactctgagccagtacccgcgacccccaccccagaaggcgaccgacctcctctgtcgccggaggatactcacggggcctgaggctgcgcggcgcgcacgccgtcccgcgccgacagcagcaggagcaggagcgggagcaacggccagagcagggcgccgctcatttttcggctcctggggggcgccgcgcctggggagggggccgggccagggctgggccagggccagggtccgagcgcggccgtcctcgcgccgccgccgggggccctttgttcgcagcccccgcgcagtgcgcccggcgccatgcgccccgctccgcgcccggccaagctggggcagccccgggccagccccctccccggacccgcctcgtctccgggaccgccccgctcgccccgctcgccccgctcctgggcgcaccctcccgggacgcctgctccgcccatctccggaccccgacccgccccgatcccttccggggatcgtcccctcacttactcaccggacccacccgggccctgcccgattccttccgaacccgcctcctcaccccctacccggattcgcccccggatgcccccctccccaccagccccgcctcggacccgaccccccaccgcccccactctccctctcctctccacccagcgtccactcggaacctgtcccttccctggcctctccctccctccctccccagccagccccttatggccccctccccgggcccgcccctcaccaggggcccctgggtctggacgccgcctgcaaccccgatcccacaggcgccgccgtgccctaagccctggcctgtatctagtgcccagtgcagtgcgtacagcccaaggagcagaggaccctttggggaaacagtctagccaggggtcgaacctcccagactcacatctgccccaggtccctatctgtgctctctgctcccctctcccccacccccactgtccacaaatcccttgggcccgtcccctctctcgctgggcctcagagtccccctttccccttcatacagcaggggtggatgggcaccccctttctctccaagagcagggtgtcccctcctgcccctccccgtgtggccacctcagtgatggtcctgctgtcctaggtcccactggcaggcggcacatcctataccatgtccaagtcctggaccccctccttccagtgtggaacccccttcccccagctaccaactgcccttcttctaaaattccagtgctgaccacaccccctcctgcccggaatcctcggggctccctgtttattttacattttatttttatgttttgagaccagagttttgctctgttgcccaggcaggaatttagtggtgcagtcacagctcactgcagcttcagactcctggagagtagctgggactacaggtgcaagcccgcacccagctaatttttatatatttttttttagaaacggagtcgcactgtgttgcccaggctggtcttgagcactgggctcaaatgatcctccctcctcagcctcccaaagtgctgggattacaggtgtgagccaccacatccagccagggcttcccgtttattgagaccaaatctaaactctggctttgatggcagagacctcagcctagttcctccaacaccctgttcttactccactgcctgcttctgcctaatctctgtcttcctctacctgcctcctttgccagtccaactcctgatccttccaggaaactcaagggaagcttctcttgccccctccctgcccctagggatgtgggtcctctgggggcttctcagccctgtcaacagcctttggacccaacactgatcacccaggcagcaccaagccctgggctgggcaatgaggaccctgggacatacaggacctgctgccactgagcacacaacccagaggggacgtaactgatgatggtgtgttggtgtgtgtgtgtgcgtgcacgcgcgcaggggccggagtagattgagtagccgtctctcctgcctggagaagaggaggagctgcctgcctccaagctcagaccaggccaaccccaaacaggctgctaaactcacatggaggtgcaaaaatctagcaccaagaagcagcatctgatctcaccctcatcatcgaagtttgccccatgccacccctccgggcccctccaggccaactctgactcctacctaagccaacctccactcctcagcctccaggccagcctttgagccctccgcctcccccttgaccattgggctctggccacatttgctcctgagatacatcagacccccacccaccaccaccatcttgggccaaggtgccagctgtcccctctgcctgggatgcacttccccgtggcatcacaagaccggctgctctcctccaccttcagggttagcccggaggtgccttccctgcctgcctggtttgtaaggtctaaaatgtcagtgctgccttggcatggttgagccacacaggaccacgatgtcctgaccgaccgttcagctactcttgccaaatatgccccctgcctggcaagagaagctgctctccacctggctgtctcaccaagcaaccagaccagctgcaccccacccatcagccacagacttcacttccctagctgctgagaagttattgaaacaagccatgcccagtcgtggtggctcatgcctgtaatcccagtactttgggaggccgaggcaggtggatcacctgaggccaggagttcaagaccagcctggccaacatggtgaaacctcatctctactaaaaatacaaaaattagccaggtgtggtggtgcacacctgtaatcccagctactcgggaggctgaggcaggtgaatcacttgaacccaggaggtggagtttgcagtgagccgagattgcgccactgcactccagcctgggtgacagagtgagactccgtctcaaaaaaaaaaaaaaaaaaaaagaaagaaagaaaccaatcacatcctcccaggagaaccaggggctgcctcaccctcttattactacaaagcctgcttcccacagcccctgcttgttcattgtgctcccgagtgcaacccctgtgtggcctcacacagtgtacagggtcctcctcccgtcattgtgtgagaataggtgagcactaaactgtagatctcacccacccaatgtcacatgttgtatgtttggccatctcatactcttttttttttttttttgagacggagtcttgctctgtcgcccaggctggagtgcagtggtgcgatcttggctcgctgcaagctccgcatcccgagttaacacttttctcctgcctcagcctcccaagtagctgggactacaggcacccgccaccacgcccggataattttttgtatttttagtagagacggggcttcaccatgttagccaggatagtcttgatctcctgacctcgtgatccgccctcctgggcctcccaaagtgctgggattacaggagtgagccaccgcgcccggcctattttttttttttttaacggagtctcactctgtcacacaggctggagtgcaatggcgtgatctcagctcactgcaacctatgcctcccgggttcaagcgattctcctgcctcagcctcccaagtagctgggactataggcgcctgccaccatgcctggctaatttttgtatttttagtagagacagggtttcaccatgttgcccaggctgttctcgaactcctgacctcatgtgatccacctgccttagcctcccaaagtcctgggattacaggcatgagccactgtgccgggcccatctcatactatttagagcagcagtccccaacctttttggcacaagggacaggtttcatggaagacattttttccatggacaaggggcaaggtgatgggagggacagtgatggttttgggatgatcaagtgcgtgacatttattgtgcactttatttctattattgttacattgtaatataatgaaataatgatacaactcaccatcgcgtagaatcagtggaagccctgagctgttgttttcctgcagccagagatcctacctgggggtgatgggagacagtggcagattatcaggcattagattctcataaggagcatgcaacatagatccctcgcatgcacagtttgtaatagggtttgggcttctctgagaatctaatgctgccgctgatctgacaggaggtggagctcgggcgataatgtgagcgatggggagaggctgtaaatacagatgaagctttgcttactcatccaatatcagaccagtgtcagtctgtggcccaggggttggggacccttgatttagatcatgggtgaataggagccaatgaggacactagcatggcccggtcatccagtttgactgcatggtacacaaaacacagagcatggtcttattattccatacacatctgcttcctgtctgtcttctttgggatgtgagccccccgtttgctgctggccgcagcccctggctcaaagtgggcacacctcacacagattactgcctcatcagcacacgggagaaggctcgctgcttagaagagtcagttgatactattccatgaattatacaagcctgagttaacaaagccatgactaaaaactaaattataccgatttgcaatgaaacacattatacaggttgagtagccaaaatgcattatcggccgggtgcagtggctcacgcctgtaatcccagcactttggaaggccaaggtgggtgaatcacttgaggtcaggagttcaagaccagcctgactaacatggtgaaaccccatctctacaaaatacaaaaattagctgggtgtcatggcaggcacctgtaatcccagctgcttgggaggctgaggcatgagaatcacttgaacccggaaggtgaaggttgcagtgagccaagaatgggccactgcactccagcttgggcaacagagccagaccctgtctcaaaaagaaaaaaatgcctaatctaaaatgcactttccaaaacggtcagtgcaagaaatgttccagatttttaatttttcagatttggggatatttgcattatacttactggtagagtatcgtgtgtgtgtgtgtgtgtgtgtgtgtgtgtgtgtgtgtgtgtgtgtgtgtagtctggctctgttgcctgggctggagtgcaatggtgcgatcttgactcactgcaaccttcacctcctgggttcaagcaatcctcccacctcagcctcccaagtagctgggactacaggcacatgccaccacatcaagctaatttttgtatttttatagagacagggtttcaccgtgttgcccagctggtgtcaaacttctgagctgaagtgatccacctgcctcagcctctcaaagtgctgggattacaggcatgagccatcatgcccagagtatctttaatctgaaaatctgaaatctgaaatgttttggtgagtgtttcctttgagcgtcatgttggcgctgaaaatttttaaattttggagcatttgtggaatttggattttcagattagagatgctcaacgtgtattaaaaatatggctgggcgaggtggctcaagcctgtaatcccagcacttggggaggccaaagagggcagatcacttgagaccaggagttcgagaccagtctgaccaagatagtgaaaccccatctctcctaaaaatacaagaaattagccaggggtggtggtgcatgcctgtaatctcaactacttgggaagttgaggcaagggaatcacttgaacccaggaggcagaagttgcagtgaactgagatcatgccactgcactccagtccgaacgacagagtgagactgtctcaaataaaataaataaataaataaatagcaaaggcgctgaaagtactcaaaactcatcacttcgtcttcattttactacattttacaattctctgtactcttgaggttatgcatggtgaaaatactccataataacacagatctcttcctaactctatgtttagtcacttcacgccagtaggttgaaattacccatgggcggagtacagtcacttccactttatcacttgttttgaaagcacaaatgtgttccgacatgatggatgcattaggaatgatttgagcataaaatcaaatattgtgttcacttatgtaagatttttgtctgcaagaaacattgggtatgaatgcagaaaactgcacctggctgaccccagccacgtaggaatacacaaaaaccacacctgcaccctctccagcatctctgtgctccctcagtgccttgctgtgtgccaggagccacatctgtccctgtctgaggttacaatatcccgcctgatttcagatgatctcctcccagaccttcacagtaactcacaggctgccacctccccatgcccaggtccacaaatgagccttcagtctttccaaggctgatactgtatttgtgtattttttttcttttcttttcttttcttttttttttttttttttgagatgggttctcactctcttgtccaagctggagtgtaacggcacaatcagggctcactgctgcttcaacctcctgggctcaagtgatcctcccgcctcagcctcccgagtagctgagaccacaggcatgtaccaccatgcctggctaatttttttgtatttttagtagagacagggttttgccatctcactcaggctagtctccaacttctggactcaagcgacccacccgccttggcctcccaaagtgctgggattatacaggcgtgaggcatcgcgcccggccatattcttgaaattcttaaccatttgacatttgtacaatgtcactaccatttttagtaggtgcctattttttttttaggtgtcattggtgacatttggatggttgtgccctgacccgttttcccatgagccctgtggtttgattgtgtgaatttgcagcgtgaggtcatttttaggaatggccctgttgtgtgagggcggaactggctgcattagccccatggtaagtggttgtcaaacatctccaaacatgcctaggatgagcagctttgcagtttggatgggggacgaggaagaccgcaaagactgtcctgttgtcaatgggcgtttttctttttttttcttttctttttttttttttttttgagatggagtctcaccctgttgcccaagctggagtgcagtggcgcgatctcggctcactgccaacctctgccacccgggttcaagtgattctcgtgcctcagcctcccgagtagctgggattacaggcacatgccaccacgcccagctaatccagctaatttttttgtttttttttagtagagatggggttccaccatgttggccaggctgttcttgaactcctgacctcgagtgatctgcccatctcggcctcccaaagtgctgggattacaggcatgagccactgcgcctggcccaatgggcgtttttctcccacttagccagcatgtgcctgtgcctgccaggtgcccaggagattggatgtcaggactgaagacagacagacagcctgatggcctgcagtgatctgggtcttctagcacagtgcccctgacagggttcctagggccagagggagatcaggccatgcctgtccaggacatttcgtataaatggaatcatacactatgtgtgcttttgtgtctgccttctctcacccagcatcattttttgtttgtttgtttttttaagatggagtcttgctccattgcccaggttggagtgcagtggcgcaatctcggctcactgcaacctccgtctcccaggttcaagcgattcttctgcctcagcctcccaagtagctgggactacaggcatacaccgccatgtccagctaattttttgtatttttagtagagagagggtttcactgtgttgcccaggctggtcttgaactcctgatctcaggtgatccactcacctcagcctcccaaagtgctgggattacacgcatgagcctctgcgcccagccaaaatatgcaatgacacctaccaggagtgaggcaggaatgattttcttaataacatgtttattattcttttctcccccttgctttattgtcagaatacgatatataatacatagaacatacaaaatatgcgttaattgatcgtttatgttatctgttgacttctggtcaacagtaggctattaatagttaagttttgggggagtcaaaagttatgcacagattttcaactgccaggaggctcagcaccccaaccccattgttcttcagggccaactatacatctgtttagaaaaacaaaaatgtacactgaagcacaaaaattgggccaggcacagtggctcacacctataatctcagcaccttgggaggtcgaagtgggaggatcacttgaggtcaggagttcaagaccagcctgggtattatagtgagacttcatctctacaaaaaattaaaaaatttggccagatgcggtggctcacccttgcaatcctagcactttgggaggccaagacaggcagatcacttgaggtcaggagttcgagatcagcctggccaacttggcgaaatcccgtctctaccaaaaatacaaaaattacccgggttggtggcaggagcctgtaatcccagctacttgggaggctgaggcaggagaatctcttgaacctaggaggcggggttgcagtgagtcaagatcgcgccactgcactccagcctgggtgagagactccatctcgaaaaaaaagaaaaagaaaagaaaaattagctgtgtgtggtggctgagtggcctccaaaggtggcttttagggggacatctgggatctgccccagcaagtcccagctattcaagaggctgaggcaggaggattgcttgagcctaggatttgaagctgcagtgagctatgattgcaccactacactccagcctggatgacagagcaagactctgtcttaaaaaaaaaaaaaaaaaaaaagccggcgccgtggctcacacctgtaatcccagcactttgggaggccgaggcgggtggatcttctgaggtcgggagttcgagaccagcctgaccaacatggagaaaccccgtctctactgaaaatacaaaattagccgggcatggtggcggcgcatacctataatcccagctactcaggaaggctgaggcaggagaatcgcttggacctgggaggcagaggttgcgatgagccgagatcgcgccactgcactccagcctgggcaacaagagcaaaactcggtctcagaaaaagaaaaaaaaaggatggggcaggataacaggatgcaggcctgggactttccatggaggaagaggcctcagaaaggtctatgtctgggacaaggcgacctgaagtgcccttgggcttaacctcttggactcagccctctctggggtttggagatgccagctgccccaaaaaccgctccgagcacaagcaatgtgccacacagccctgtggcaggaaggagctcgtgcccgctccaagtagcaccaagcgtggaggaaggcaaaggagactcgggctgccacaggccctctctgggtgtggggaccagagatcaagccaggttcccattcttgccctgtgaatcctgcactgtgtcctcagggcggggagtgtacgcaggccatcgggggacagcacagggcagttggtccccagccggtggggaccagtgtgtaggctctagggtcagcctcagggtggccttggggatgtgcagctccttggagaagatgaactcacagctggtccaagctctgacgtcacttccgggaggaagcttcagcctcataactccagaaccacttccctaaaatccgagtttgccgagtttttgcttcaaccatcttgagtagctttgtcctgcctggaccctgagtctgagcaaagataatgccctgtgatcatccagccccagacagccttgaggcaccaccgcagccccactgttcctggggcatgccctagatgtcccctgaaggctgccctcggaggtcagtcagtgatccgccctctgcaccaagagggcttcttcccatctttctggctccttctggcagcttcaccatggtgaagccccttctggggtgctccttcagctgggtgactgtgcctccaaatgcatgcttgtgaagtctgcacctgcccagctcacctggggtctgtctgcacctgcccagatcacctggggagccatgtctctgtccaccttacctggaggctgtctctacctgagctcctcatctgggggctgtccacaactgcccacctcacgcgggagctgttcacacctgcccacctcacctggggtctgtccatacttgtccatctcacctgggggctgtccatacctgcccacctcacctggtagctgtgtccatacctgcccacctcacctgggggctgttcatacctgcccatctcacctggcggctgtccacacttacccatctcacctggggactgggtccctacctgcccatcttacctgggggctggccacacccgcccacctcacctagggtccatgtacccacccacctcacctagggactgtctacacccgcccacctcacctagggacggtctacacccacccacctcacctagggactacacccacccacctcacctaggtccatgcacccacccacctcacctggagggccatgtctctacccacctcatttggaggctgtctacaccagtccctgttgcctgggggctatgtacacctccccatcccacctgaggactatgcacccatccacctcacctaggatttacccacacccacctgggggccatgtccccacccacctcacctgggagctaactacactcgctcacctcactgtgtccctacagggtgagcacaggcggagggcagggagtggggcaggagtgtcagggagcagggcaggggtgtgtgcgtctgtccgggaagaagggtggagatgctgcctgcagccctttttacctgcacctgagccctcagtgcagctctgcatcagacactcccagggcccggggtctggtgaccggcaccatctcctgtctcttaggtggcatctctgcccaaccattccttcttagaggctcctgtgacatgagagcaggaatggggcctgggacagcactggaataagaaaaccgaggccctggccaggtgcggtggctcacacctgtaatcccagcactttgagaggccgaggagggaggatcacttgaggtcgggaattcaagaccagcctggccaacatggtgaaaccctgtctctactaaaaatacaaacattagctgggcgtgattgtgggtgcctgtaatcccagctgctcaggaggctgaggcatgagaatcacttgaacccaagaggtggaggttgcagtgagccgagactgtgccactgcactccagcctgggcgacagagcgagactcggtcaaaaaaaaaaaaaaaagaaaaagaaaaagaaagaaagaaagaaagaatggaggggcagggtgggagagagagagaaaggaaaagaaacgaaaagaataagaaaagaaaagaaaagaaaagaaaagaaaagaaaacaaaactgaggcccagacacgattcagccccagtaggcaccctggcaagctctgccttctgggcaagcaggctggaaataaaagcaccacagtgaacaccctggcccgcctcggctccgccagcagcatctgtcctggagaagacgccagctcagtaccagaaatgttccggacacaacctggaccgggcagaagctgaggagccaccaggctgccagcagttccaagcacatgctaggggctgcggagggggctcgccaccctctaactccctgggggtggcctcgtccagccccgcaggaggcctctgtctattggagctaagcctggagacggccactccggccaatggcctgtccaacccaggtgtagacagcccctgagtgaggcaagcaggcacatggccccccaggtgagctgagtgggtacatggcctgccgaggtgaggtaggcaggtataggtaacccccaaatgaagtagacaacccccaagatgaagtgaacaggtgtagacagcccctggtagacaggggcatggtcctccagataagacgggtaggtgcatggcctcctagacgacataggtggtagacagcccccaggtgagggggacaggcataaatagcccccaagtgaagtggacaggcatagaaaacccccaggtgaggtggacatgtgtagaaatcccccaggtgaggcggacaggcgtagaaatcccccaggtgagttggacaggcgtggaaatctcccaggtgaggtggacaggtgtagaaagcccacaggtgaggtggacagacgtagaaagcccacaggtgaggtgggcaggcctagaaagcccccaggtgaggcagacaggtgtagaaatcccccaggtgagatggacagatgtagaaatcccccaggtgagatggacagatgtagaaatcccccaggtgagatggacagatgtagaaatcccccaggtaagatggacagacgtagaaagcccaaagctgaggtggacaggtgtagaaatcccccagctgaggctgacaggtgtagaaatcctacaggtgaggcagacatgtgtagaaatcccccaggtgaggaggacagttgtagaaatcccccaagtgaggtggacaggcatagaaatcccccaggtgaggtagacagggacatagcccccaggtgaggtgaccacttccttcccttccttcctcccatcaccaaatgtccacagacaccgcccccacccaggccagcataccaggtgctggagactggcccagctctcagtggctcccaatattttggcagatcagttccaaacaggtgcattctagaaactctgacagcagggctcaccccacagggcaccggtgaggatgggaacccaggaatgtaaggccagccctgagcctggacctagtcaatgttccataaacggcagcctagggacactgggaccaggcagcccaggagtgggagggaggagttggctcctgctggatcatggtggtggggcagggtgggggtcggggggatgttgcaggaggagacgtttgtttcatcacttgttcatgcaaaccttctgaggcaccctcgccattcagctccccaggcccccatccagcccacagcctctgccatccctgccctaccctgggacttggactctcattgccctgtgagcccggctggctcattcccgcttcccagccagcagcccctcacctgccagggctccaataagctttggctctggagggcacccacactgcccctcctccagccatctttttttgggagtataattggggtataatttacataccacaaagttgacccagtgaaagtgtctggttcaatagatttactattgattaagatctatttaatcaatagattttagtatacttacagttgtgcaactgtcatcacttctatttcattctagaacatttcatcccccaaaaggagaccccgtccccattagcagtcactccccattccctctcccaaagcccctggcagccactcattgcttcctgtctctatggatttgcctgttgtgggcatttcatatcaatggaatctcacactatgtggtgtttcgtgactagcttctttcactcagcattgtgattttgggggttttgttttgttttgtttttcagacaggatctcactgtcgcccaggctggagtgcagtggaatgatcatagctcactgcaggcttcatctcctgggctcaagcgatcctcctgcctcagcctcccaagtagctgggactacatacaggtgagcaccaccacactcagctttttttttttttttttttttttttttgagacggagtcttgctctgtcgcccaggctggagtgcagtggcacaatcttagctcactgcaagctccgcctcccaagttcacaccattctcctgcctctgcctcccaagtagctgggactacaggtgcccaccaccacgcctggctaattttgtttttgtatttttagtagagactgggtttcaccgtgttagccaggatggtcttgatctcctgcccttgtgatctgcacatctcggcctcccaaagtgctgggattacaggcgtgagccaccgcacctggcccacccagctaatttttatattttttgtaaagcagggtctagctatgttgcccaggctggcctcaaactccagggctcaagcgatcctccctcctgagcctccccaagtaccaggattacaggcatgagccactgcacccagccttatttggtttttgtatgggtctgctttatttttctggtattggtcttaagttctccaatttatctcctcccgttcccccttcatttctttccaatcaagctgtttctctccctccccatcactcccctgaaactgatttcatcaatgttaccaatgatagacaatttccttaattgaatgttctatttgtgtgcttgttttatttgatttacaagaagcattggacacagctctctttttctttcttttcttttcttttctttctttgagacggaatctccctctctttcccaggctgaagtgcagtggtgcaatcttgactcactacaacctctgcctcccaggtccaagcgattctcatgcctcagcctcctgagtagatgggatcacaggcatgcaccaccacaccggttaatttttgtattttactggagacagagtttcaccatgttggccaggctggtcttgaactcctggcctcaagtgatccacctgcctcggcctcccaaagtgctgggattacaggtgtgagccaccatgcccagcctcttttttttttttttttttgaggcagagtcagtggcgcaatctcggctcactgcaagctccgcctcccgggttcacgccattctcctgcctcaccctcctgagtagctgggactacagccgcccgccaccacacccggctaatttttgttgtattttttaagtagagatggggtttcaccgtgttagccaggatggtctccatctcctgacctcgtgatccacccacctcggcctcctaaagtgctgggattataggcgtgaaccaccgtgcccggccccatgcccagcctctttaacaaacatcttaattggctttatgattgcaggtgtactttggttcagcaactccaagggcccacataacctgcctcagaactccgcatatctgccttcttccatcctgtggtccctcacaccagatgtggtgggtggcagtcctaacagcctcctgtccctgaaacctgccggtacctctcactgcaactccgggaggctggtacaaatgctcctatcccaggtcagccctggacccggaggccagagacaaaaagaccccagctgggcttccagctccccaggggaaagtttggtgccgaaaggaaaatatttacgtggtttgtaagttgagctatccccctgcagaagtgatcaaaaggacagtaaagatggaaagtccgtgttgtcgtgatgcaggctgtgccaagccacgcagcaggcgtgatcctggaggactcttcagggagctgatggacgtgacctgccgacccttttgttttctgaaatcaccaaacatctgctgagtgagctgcttcctggacccttttgggaatgttcccaggcttggttgttgaggaaacacagtgcaggggtggagtgggttctggaggctgcgacttggccagagccgcctgtgtgcgtggagcggggtgtggggggtgtttggatcacctccaggggtccttttcagcaggaacacacgagtcatttttaatcaatcaaaaagaggaaaagagacaaaatgcatttaatgaacactcccataccatgctgtgatgaaatgcttttaaaagtcacaagaggccgggtgcggtggctcacgcctggaaccccagcactgtgggaggctgaggtgggaggatcactttgaggacaggagttcgagaccagcctgggcaacatagtgagacctcatctctatgaaaaataaaaattaaaaaattagctggccatggtggtttgcacctgtagtcccagctacttgggaggctaaggtgggaggatagcttgagcctaggagtttgaggctgcaccaagctatgatcgtaccactgcactctagcctgggtgacagagtgagaccctgtcgaacaagaaagagagagagagagacaaagggagggacggaaggaaaggaaaaaagaaagctaggcaccaggcttctgttgtgaattaaatgtttctatttctcactcactgcaactcagaccgccacgcctcacgcagatttatcagaaagcatctgcaggccaggcatggtggctcacgcctgtaatccaacactttgggaggctgaggcgggagaatcacctgaattcaggagttctagaccagcctggccaacatggcaaaaccttgtctctactaaaaatacaaaaaattagccaggcatggtagtgggcgcctgtaatcctagctactcaggaggctgaggcaggagaatcgcttgaacctgggaggcagaagttgcagtgagccaaggttacaccattgcactccagcctgggcaacaagagcaaaaactctgtctcgaaaaaaaaaaaaaaggcatctgcaaaggttatagggagattcctggggggaagaaagcagcctgcttgaggaatcttttgctcacaggtaaaaaagcaagaaggccaggcagtggctcacacctgtaatcccaatgctttgggaagctgagtcaggaggatcacttgaggccaagagtttgagaccactgtgaacaatagagggagacccaatcactaaaaaatatttttaaaattagctgagtgtggtggtgcacacctgtagtccccgctactcaggaagctgaaacaggaggatcgcttcagcccaggagttcaaggctgaagtaagctaggattgcaccattgcactctggcctgagcaacagagtgagaccctgtctcaaaattaatcaaaaatggaaaaataaaagccaaaggaaaaccaaatgggtctttcacacaaatgtgaaccagaaccttccacatcagcacagagaggaggaaaaagaaccacagaggatgaggagagaagagtgctggcccgggtcccttgtgctaggaaccagctggatgccaggacacatcaggcacagccaaatcccacatgggtctgcagcaggggcacccgggatgattatgaggtactcctagggagagctcatagtcccagccaatgctcctaattgcctggggtcagtaggtcgctgagctaatcctcctgagcacatcgggggtctctgccatcactgagcggggcttccagaactccctgcaacccaatcaagtccaattagccaaaaaggcaggaatgtgggctgggaccccagcagggcttagaggtctcggcaggagaccagggtggcccagggatgtctcacttgtggggaacaagccccagaccccagccttgtccagggcagggagggaggaaacccccaggctcgggtcagtggggtctgtctgttcagtggggctttcagctgtgggatccggggacatcagtgttggtgggtaatttgatgttctgctcatagatgcatgatgatttaaaagccacatttcagtaagtcaggcagaggaggacaaatattgcttgattgcacagggaatagccaaattcctagagacagacagtagaagtgagactcccaggagctggggtagaggactggagactggtttaagggcctggagtgataaaaactttggggtgtagatatggtgatggttgcacacattgagaatgcatttaatgtcactgaattgtaccttccaagtggttaacacgatcattatcatgtagagttggggtttttgttgttgttgttgttgtttgagacagagtctcactctgtcccccaggctggagcgcagtggcatgatctcagctcactgcaacctccgcctcccaggttcaagtgattctcctgcctcagcctcctgagtagctgggactacaggtgcacgccaccacacccggctagtttttgtattttcagtagagacagggtttcaccatgttggcctggctggtctcgaactcctgacctcaggtgatccacccgcctcggcctcccaaagtgctgggattacaggcatgagccactgcgcctggcccatgtagagtttactacaatgtcaaataaagactttaagtttgaaattagcatttaaccatttaaggaaattggttcatgaaatgtgtagcttgatttattatttgcgtggcagtgtttaaatattcgggaaaatgggcagagcgtggtggtttacacctgtaattcccagcacagggactgtctagggggactgaccctaccaggccaggtgatggttagagggctgagctgaggggcaccagcagggggttcagactcacacccaccccaggatgatgttgatgcagtccccacccagggtctcagatgtgggaacacgcccctcctttaagtgctacctgccactattgggagtctgtgtaagactaacactccattctttaaaaaggtaagcacatggctgggcacggtggcctacgccggtaatcccaacactttgggaggctgaggcgggcgaatcacttgaggtcaggagttcgagaccagcctgaccaatgtggtgaaaccctgtctctaccaaaaatacaaaaattagctgggtgtggtggcacgtgcctgtaatcccagctactcaggaggctgaggcaggagaactgcttgaactgaggaggcgggagttgcagtgagccaagatcgtgccatcgcactccagcctaggtgacagattgagactccatctcaaaaaaaaaaaaaaaaagaaaaaaaaagaaatcctcccaccttagcctcccccaaaaatttttaatattcaatttattaagcatttccatctaggaagtacatttccccaaatatttaaacattgtcatgccactaataaatccaactatacattaatgaaccaatttccttaaatggttaaatgctgattgcaaacttagtcaaagtctttttcttgccattgtagtaaaatatacatgatattgatcatgttaaccacttggaaggtacaattcactgacattaaatgcattcccaatgtgtgcaatcatcaccactatctacatcccgaattttttttttatcactccagcccttgaaacagtccccagtcctctaccccagcccctgggagtctcgcttctactgtctgtctctaggaatttggctattccctgtggctcccataagtgcaatcaagcaatatttgtcctcctctgcctgactgaaatgtggcttttaaatcatcacatgtctatgagcagaacatcaaattaaccaccaaggccggtgtccctggatctggatcccacagcccaaagccccgctgaacagacagaccccactgacctgagcctgggggtcccctccctccctgccctggatggggctggggcctggggtctgtttcccacaaatgagacagttcctgggccaccccagcctccctgccgagaagccccccacctgctggggtcccagcccacattcctgcctttttggttaattggacttgattgggttccagggagttctggaagtccccctcagtgatggcagagacccctgatgtgcttgggaggattagctcagcgacccactgaccccaggcaattacgagcattggctgggactctgagctctccctaggaggaccccataatcatcctggggtgcccctcctgcagatccatgtgggatttggctgtgcctggtgtgtcctggcatccagctggttcccagcaccagggaccaggaccagcactcctctcttcttgtcctctgtggttctttttcctcctctctgtgctgatgtggaaggttctggttcacatctgtgtgaaaaatagtgttagttttcctttggctgctaaccttacctaattacctctctaataatgaccttaactccaaatacagtcacattctgaaggactgtgttataaccttcacgtatgaattttggggagacacagttcagcccatactcttccccacttacagaggagatgatggaggctcagagaggggaagtcatttacccaggtcgcacagcaaaagggagtaggacaaacatcgaacacttaccgggtgccaggctcaatttcaaggctgtgtttgcctcacttgttcattttgccaatgtctattgtgccagatgcaaactgaagtgaaatacactgatgggactgggcatggtggctcacgcctgtaatcccagcactttgggaggcagaggcaggcggatcacttgaggtcaggagttcgagaccagcctggccaacatggtgaaactccgtctctactaaaaaatacaaaaattagctgggtgtggtggcacacacctgtagtcccagctactcgggaggctgaggcaggagaattgctcgaacccgggaggtggaggttgcagtgagctgagatcacaccatcataccactgcactccagcctgggtgacagagtgagactccatctcaaaaacaaacaaactgggtctcactctgtcgcccagactggagcgcagtggtgcaaacgtggctcactgcagcctcgacttcctgggctcaagcgatcctctcaccttagcttcccaaagtgctgggattacaggtgagagccactgtgcccagccttatccttcctttctatattgcccgtggttgcttttgtgcaccaaggtcaatccaaaaaataattgagtcagtgagacacagaccatctggctttacttccttgtagtcacaactctggggattctaagtctgaccatcctagccccatggccagggatgtcaggagatgatggtggtcattttgagcagtaggttcccttgcaagccatgggaggacacaggctgtgtccaggacacatcccctggaggcgtgggtgtggagaccatgagccgaattcattcattatctaaaatcaaactcaattctcatgaagtagggacgtcagccttacagagtcgggcatgtgccgcccatttccacctgtgggtggaatccaccactcctgttgactctcagcggtgcccggcttagatgatagattctagggtctctgctgttggaggtcaagactgtgatgtaatgaagtatttttttcaatgtgtgtcctgtggcagtgcccaattcagaaaacatagagcaggattttagttccaaatgagtcaagttttatatgttaagacatcgcttgttaatcttgcacataacatctatcatattcatatgctgcctagtcttgggtttttgtttttttttaaatctgagtctcactccgtcacccaggctggagtggcagtggtgtgatcttggctcactacaatctctgcttcctgtgatcaagtgattctcctgcctcagcctccagagtagctggcactacaggcacgtgtcaccacgcccagctaatttttctatttttagtagacagagggtttcaccatgttggtcaggctgttctcaaactccaaacctcaaatgatctgcccgccttggcctctcaaagtgctgggattacaggcatgagccaccgtgcctggcccaaagacatcctcttttatctgctcatgtggatttaatgatatccccttggggtataataaaaacttctttggtctttgtccacagttcctggcacgtaactcctaaatccctagaatggacattcattcataggatgaacgaaggtgttaagatgagacagcactatgggccaggcacggtggctcgcaacactttaggaggctgaggtaggcaggtcagttgaggccaggagttggaaagcagcctggccaatatggtgaaaccccatctctcctaaaaatacaaaaattagttgggtgcagtggtgcacacctgtagtcccagctacttgggaggctgaggcaggagaattgctcgaacccaggaggcagcagaggttgcggtgagccgagatcatgtcactgcactccaggctgggcgacagagcaagattctgtctcaaaattaaaaaaaaaaaaacaaacagcactatggaagcgttggctgaactgaagcaactgcgtggggtccctcaatattaaagggctccagacaagtctgctgtatttgccccagtttgcagaaattttaaaagctgaaggcagacactacaacatgaaacccaacctggactcactggggacaaccaggcagattcgtcgcactccagcccagaagacagagcaagccctgtctaaaaccaaacaaagacaaaccaggcaacaaaacccacacctccagcaatacgaattggaaatgtgacctggggatcagtaagttcccaaagcccacaccgcgtggggtggaagctggagagctggttggaggaaaatgttctgggccaaagtcccagtggagcacagatggggtttatggcaagagcctgagcatctcccagtgacaactaccgagactggaactgaaatatgtcccctccagtcgaggtgcgggatgccgggacccagtggtggacgtcctggagggcgggacccagggttccctggtggaggtgtggaaggacgagaccctgcagtctctcaagctgccagcgagatggggacccagagacctcccgaagctgccagcaaggcagggacccagcagtttctcaaggctgcctgggacccagttgccagattacgaaggcatctcaggccctggagccagagccagtcgggttaaagtggaagctccctacttcagccccagaagctggggccaggggaaggatgatgtggattgttcttgttttaccccttctgttgaatgtttacagacacaaacttgagttccaataaagaattgcatttccctaaaaaagtaaataaagtatgtccactcgagggacaattcttaacttgctgtcccaaaaccacccttgtgactgaaggacatgaaatcatcttgaaagtgggatactgggcatgtcgtggaggcccggaatttcaggaccagtcatccagaagaacttgagaaaacacaggtcttccaactggccccttcatagaaaatggaggcttcaattgcaaaacaggtttacttttttatcaaacaagattatcacataaaaaatagctacagtgctacggtagtatataaagtgctcaagtatcctgaatgtaaccatgagtcatgacaagtccctccctgaacgagagagagagggcgggacttctgcctggctgcttgaagaaaaatcttcgcttgggctgatgaacgtggcctgagcgggggctgacgaggcacccgggttgtcgtcctcagacaggggcgtgttcttgggtgctcccccagattctctgcaggcactgtcttgattgaaataccaccggctggggggcgccatgccctgggtctcttcccagacttcctggtttgccaaggctgcctctttgcttgcctctgcggagagttccagcacctgggcaaagctcctgttgaggatgggagaaagaataacggctttcaccctctgaggtgaagcgcatgtgtgtggtgaacggagggctgccacacggggaggcggattttcacatgccctacgtgctcagtgggaaagggccagcaaataagatccgtctgaaaagactcaatcagggaaaccccccaagaacagcaccagacatgaaaggaaagattcatccaagaaatgttcatggagctcagtgctgtgctgctgctgtggtgggagtatctgtcccctccaaaactcccattaaaaattaatcccctggccaggtaaagtgggattgaagtgctgtaatcccagaactttgggaggccgaggcagacagatggcttgaggccaggagttcgagaccagcctgggcaacatggcaaaaccacgtctatacaaaaatttttttaaaaatactgggcgctgtggctcacacctgtaattccagcactttgggaggctgaggcgggcagatcgcctgaggtcaggagttcaagaccagcttggccaacatggtgaaagcccatctctattaaaaatacaaaaattagccgggcgtggtggaacgcacctgtaatcccagctactggggaggctgaggcaggagaatcgcttgaacccaggagacagggtctatagtgagccgaggatcgcgccactggcactccaacctgggcgacaaagtgagactccgtctcaaaaaaaaaaaaattagctgggtgcagtggtgcacgcctgtagtcccagctacttgggagactggggtgggatgatcgcttgagcctcggaggcagaggttgcagtgaaccgagatcgcgccactgcactccagcctaagcaatgaaatgaaatcctgtctcaataataataataatccccaatgtggcagcagcgagaggtggggcctttaagaggtaactgggttcatgaacattctgccgttcatggatgaatgagttatcctgggagtgggactgtggctttataaccctttgatgtctcctgaattgatccatggccacccacaggagaaagaaatgccacagtgggtggctggctgttttgcataagtccttttccaatattttaagcaactcaggaaaaagatttagcattgtaaaaaagagaaaagatactctactggaagaggtggagaaaagcgcgtggttagaaatctcctgggggaggttaaaaaaaaaagcggggggagatcttgatgggttttgggggtctggacgcacaaggatatgtgctctgtgcaagccactgcacagtcctttaagatctgggccatttctatcaatcagaagttcaaaaaacatcctcctgggaccttaccctggaaggcattgaaaacaccaacagggctgatgtgagggcgcctgtgctgctgggttactctgaggatgtgaatgataggtgacaccctttctcttccagctgcttgagaacttccatagattttttttttttttttttttttcctgagacagggtctcactctactgctcaggttgtaatgcagtggcacgaccacagctcattacagccttgacctccccaggctcagatgattctcccacctctgcttcctgagtagctgagaccacaggcatgcaccagtgtgcctggctaatttttgtgttttttaaatagagaggcccggcatggtggctcacgcttgtaatcccagcactttggggggctgaggtgggcagatcacttgaggtcaggagttcaagaccagcctgaccaacaaggtgaaacactgtctctactaaaaatacaaaattagccgggcgtggtggtgtgcacctgtaatcccagttagttcggaggctgaggcaggagaattgcttgaacccaggaggtggaggttgcagtgagccaaaatcatgacattgcacttaagcctgagcaactctgtctcaaaataaataaataaataaatagaaacaaggtctcaccatgttgcccaggctggtcttgaactcttggcctaaagtgattctcccacctcggcctcccaaagtgctgggatgacaggcgtgagccactgcgcctggcccttccatggatttttctgagctcttttgttctctcttccccctgctctgcttgagtcttatactctgtgaatctaggacacgtcttatagcatatttgatcctcacttcacctagagtccccattagctcaaaaatgactgagaagtaggctagaaaagggaaattagctgggcatggtggcgcacacctgcagtcccagctactgaagaggctgaggtgggatcacttgagcccagcaatttgaggttgcagtgagctgagatctgccactgcactccagcctgggcgacagagtgagaacctgtctcaaaaaaaaaagaaagggaaggcaaggcgggtgcttttggatggagattttgttatccacaatacagatgacaatgacacctgctggccattcttgtatcatgcagcgtctgggaaaagagcagctcgctcaggggactgaacctcctctgaactcctagaggaactcggcaccaccccaacagtgcagccaccaacagccctgagcaaacagggtgccacctctttcttaaagcattttccgaggtaccttcggagctcaaggtcctttttcgccgtcacgtccttgagttcgctcagtaagtccagcacctgcacattttcttccgaatcaccaacatcaagttctcccaggaggcgctgagtggtcaccagttcatgctgcagggcgtctggaggggaagagggatggtgggcgatggatggcaaggtgccccacgcaaggcacacacaagtggagcggccgacagacttctgtcatgatgctcggctatcgcgctggaaccgtggagagcgcacagggaagaagcagaagccaaggaagacattcgtcccttatccatcccgtgctctgagattgtgggacaggcacatccatctatccaggagggcattggaccagaactgaaatgtcactctggtgtcctcaacagaaaccaatgcaaatgtgaaaagggctgtgctgtgccagggagaatgcctgaggcctccaagccagaccatgagcaactgaaaaacagtccttgttgcctgcaccactgagcagaaggatgcctgcaactgcgggacctgtgtcacctgcactaggacaacacgcctctctaccctgacatacatcacatcaaggccagtcgtacatgagagtcacattttgggagccttttaagtgccgtatcagccagcctcttctccctccggctgtggaccgaattatgccctccccaatacgtacgtttcactccaatcctccactcctagtgaacatgaccttaaccagaaacagggttttgtggatgggggggagttaagatgggtggggcctaatccagtgacttgtgtcctcatcggatgcgggaaatttctttttttcttttttttttttttttgagacagagtcttgctctgtcacccaggctggagtgcagtggcacaatattggctcactgcaacgtccactttccgggttcaagcgattctcctgcctcaggatcctgagtagctgggattaccggcacctgccaccacacctggctattttttttgtatttttagtagagacagggtttcaccgtcttggccaggatggtattgaactactgacctcgtgatccacccgcctcagcctcccaaagtgctggcataacaaacatgagccaccgtgctgagcctgatgcaggaaatttcaataacgagacagccagggaggaggccacgtgaggacgggcagagaatggagggacacggccatgagccaaggaacgccaagggccaccagcagccaccagcaggtgggggagacacaggatgagctcacctgacagcccctggagggagccaatcccatcaacgccttgatttcagacttctggctgaaatcaagactcccagaactgggagggaatatctttctgttgttgcaaaccacccattctgtggccgcttggtatggcagccccggaaaactcaacacgatccctaggccgttcccaggaactacctaaggaactgagcagagactgagtgttttctaagagttacagatgtggaggtgaccgcagtcataaaatcagaaacccggccgggcagggggctcacacctattcaggaacccagtgctttgggaggccaaggtaggagatcacttgagcccagcagttctagatcagcctgggcaacatagccacacctcgtctctacaaaaaaaaatataataattagccaggtgcgccaggagcagtggctcatgcctgtaatcccagcactttgggagggcaaggcgggcagatcacctgaggtcgggagtttaagaccagcctgaccaacatggagaaaccctgtctctactaaaaatacaacattagccgggcatagtggtgcatgcctgtaatcctagctactcgggaggctgaggcaggagaatcgcttgaacccaggaggtggaggttgcagagagccaggattgcaccattgcactccagcctgggcaacaagagtgaaactccgtttcaaaaataaattagccaggtgcagtggtggatgcctgaagcactagggaggctactactcaggaagctgaggtgggaggatctgagtagagcctgagaagttgaaggctgcagtgagctataattgcactactgtactccaggctgggtgactacgctagaagattccacctccgcagaaaaaaaagaacaatggcagggcatggtgactcatgtctataatcccagcactttgggaggccaaggtgggaggactgcttgaactcaagagttcaagtccagccttggcaacatagcgaaaccccgtctctacagaaaaaaaaaaaaaaaaaaaaaaaaaaaaaatatatatatatatatatatatatatatatatatatatatatatatataagccaggtgtggtggtgcccacgtgtactcctagctactcaggaggctgaggtgggaggatcacttaaacccaggaagcagaggttgcagtgagctgagattgtgccactgcactccagcctgggcgacacagcaagatgctgtctcaaaaaaaaaaaaaaaaaaaaaaagaaccaaactccagggtagccaaaaacttgctctgtgggaagatacctgttctgaagagaatttaaggtgcaacgcggcagtttttcacacttgccaaagtcttcaagttagggattaggtgggaaccctatgcctgaaagggacctcactgctctgctgagggggaaagccggggtggggctggtggtcttgtcaccccccaaccactacggcatatttgttgggagcaggactcaggagactacaggtcgtccccgcaaaatgcctttcggcaggacagatcactgtgaatcccactgcccaaggttcaaatcccagtgtggttacttactcagggcgagacccttggaggaaccacagcctggccagccctccccatcctctgccttagttggggaagagggcacttgcggtgatgacatcaggcccacaggaagcacccacacacgctcctcgccccgcctgctgcacacgcactgggacgccccgtttcctacctaagagctgctgcccatctccctccaggtggatggacctcacgggcagctcgtgcctggtagtgtccagggccgtggcgaatgtcctgtattgctccttgaagcgtgtggccactgcctcgaaggggctgagcatctcgatctgtaagcagaagggataatcaggggagaccctggagtcccctctctggaaacttaacagaagcttaacggcttgtgcagggttaagatacagcgctgttcttcaccaccccccagggaatcagagctcaggaagtttccgagggtgtggtgagctcttcccaagagagccaagtggatggcaaggcggcccaggccccttactgagaacatgtgtctgccagcggttctaggcttgggccctcagctgagcccacctgctttagagtactgcgcctaaacgcctgccttccacaaggccatccccggcatggcccactcccaccccaaacatgctgtctgggtcttcatgggggtttgaaatgatatacgattgacccttgagcaacacgggagtttggggcatcaacccctgtgcagtcaaaaatctgtatctaacttttgacttcccccaaatttactgatagctactgctgactgaaaccttactgatagtaaacattcaataaacatgtaaatagattagcatctatatacacacacacatacacacacacacagacacacatacagacacacacacacacacatacacatatatattttttagatggaatcttgctctgtctcccaggctggagtgcagcggcgcagtctcggctcactgcaacctctgcctcccgggttccagcaattcttgcgcctcagtctcccaagtagctgggttacaggcacgcatcaccatgcccagctaattttttgtatttttagtagagacggggtttcaccatgttggccaggctggtctcaaactcctgacctcaagtaatccgcccacctcagcctcccaaagtgctgggatcacaggcgtgagccactgcacatacatattttttatagacagatcttactgtgttgcccaaggtggagtgctgtggagtgatcacagttcactgcagcctccacctcccagggtcaagcaaacctcttgcctcagcttcccaagtagctgggactataggcatatgccaccacacttggctaatttttaatttttatagaaattggccggatgcagtggctcacacctataatcccagcactttcagaggctaaggagggcggatcacttgaggtccagagttcgagaccagcctggccaacatggcaaaaccctgtctgtactaaaaatacaaaatttagctgggcgtggtggtgcatgcctgtagtcccagctactcaggaagctcaggtatgagagttgcctgaacctgggaggcggacgttgcagtgagctgagacagcaccactgcactacagcctgggtgacagagcaagacgcccatctcaaaaaaaaaaaaaatttttttgtagagattgggtgtcactatgttgcccatgctgggacaagtatgtatgcactcatgacatgcctaactttttcttaattttttcagtatttctaggctataaggttcatctatgagtttcttcaaattgtcacaaatctctaaaactttttccaatatacttattgaaaaaaatctgcatgtaagtggaacctcacacttcaaattcgtgttgtttgagggtcaactgggtttgtctctttttcttccattttgagctccctaaagtcagagaccttgtactcaagcccagggtctagctgcacgggtgctcacatgaaaattttggatgttaggggttgagctgtatccccccaaattcatacctgatgatccaactcccagtaccttggaatgtgcccttatttgaaaagagggactttatcagggtcatcaagttaacatgaggtgataggggggttgtaggggggatgctaatccaacacgactggtgtcttgtggggaaagggggacacagacacacacagcagggaggacatgtgaacacagagaagacaaccattcacaggccaaagacagggccaggagagattctccctcgcagccctcagacagggccaaccaccaacacctcaatctcggactttcagcttcctgaaccgtaagagaatgaattccagttgttttgcccacccaggttgtgggactctgtcccagcaaccacaggaaactcacccactgggtggggggtccgcccctgccaatcagccctttctgggttccaggggtttgttcctgtccttctcccacatggacactgctgaccacacagcattaggagtgatgtgcctctcaccagtaccctgaccctgcaggggagtcccagagcacgtcatcctgttgctgctcacgatcatcaggcgctcaggaagtctctgcacaagtgcatagaaggtgcacacctcccttattcattcacactttactttgtaacctcattctctaaaagtgtcatcatagaccaacaccaggaccagagcaagtgtggcattaaaagcccaacacagttagaagccagtgagcaatgataccctagcacgaatgctaccgaaacagtggagatgggacagattcacagggaacactcactggtcacagagtgtcacttacaactgacctgggcatccaggacatctgccagctcccgcttcctctgagagaggagaagcctgcgcttcagctcgtgggcctttttctgtagcttctccttctccttacacattattaataaattcttttctgcccttctttcaaactcagcaagattgttctccatctgttaaatgtgaaagaaaagctcaagcaggtggggactccctccccgtgaatggaggccacccttccatccatggcatacgtgaacaagaaactgttttcacctttacggatagtagcgtcagcagtagtgtctgagactccatcatttccattgcttcagataaatccttaagaaaagaaaaagaccctctcaattcctgatgaagtggtataaatccagctcttttcccagcagggggagaactctggcttgtgtggattttctgtattcagtttgatattcggtagttctctactgtagtgggtctattgcttctattttcttttatttggttttctgcggcgctgagatgaaagagggaggtccacaaccttccttcccctggcacctggcaggtggagagacagcagcagctgggtagtcaaggacaagctgagaatacccaccaatttggtgctgcaccaggaccagaatgccgtctccccacctgctggtcccccaaccaccagtcttgtcctcaccccagtgagaccacagcctagccgtcctcccaccaagggacagggcctggcattgtgcctttcccagcacagcatgggcacagagaagtcccctgtctcattttttacatggctccatattggtatccactactgaatgtgtacttggggaaatgtaaactctacaaatgatctaagaacatctgtagtcttgatttttgtcctaaagggcatgggtgtcttttatgttcttggatccgtgggcactcagcatctggttcagagtggactctaaatcagatctatgcaacccatctgtggctgccctcttctttcagacacttaccgggctctttttccgaggggcagaaaatgatgttgactcaggtttctttgatattgtttttgctaactgtggcgtctttttgacgatgcttttgtctaagataaagcacagcatttttaatggcaagtagcgtatatagactggtccctggttgccattttttttctaatgatgggtttattgggatgtaaccccatcataaattgaggagtatatggacttataacagtccagttaaagttgttcaactttgcaaggggcaaaaggcaagtttaataccctttaccaaggtattaagtatatttttgatgtacaatattttcaacttacaatgggtttgttggatgtgaccccactgtaggccaattgtactttggaagcccactgagacctactgcaacccccagtgagtgacagaaggggtgaaacaaatgatttaccattaatagcagagagatccaggtcaggtggagctgtgccatgcccttccagcaacgtggactgcaggtcaccctttccgaccccactgctatctgctgttaagaaaagaatccccgaaagtcagcacagtcaagagacactctccattcaagccaggaaacgcaggccgtgtttttgaacaataccacttgcttctaaaagcccaatttcgtccaaggtggaaaggctaaaaaaaaaaaaaaaaaaaaaacctgtggaaattcccagccatcaccttgactctatttttaaagtaccactagaagacagagacattctgtataaccaaagagacgcaaataggcctttctgctagttcacaagatgctacaggtgggatacgatgccatattcccattctaccctctactctctttccaccttttttgtttttgagacggagtttcactcttgtcacccaggtgacaatggtgcaatctcggctcactgcaacctccacctcccgggttcaagtgattctcctgcctcagcctcccaagtagctgggattacaggcactcgccaccatgctcagctaatttctgtattttagtagagatgaggtttcaccatgttggccaggctggtctcaaactcctggcttcaggtgatctatccacctcggcctcccaaagtgttgggattacaggcatgagccaccgcactcagccaagtaatctttccatcttttttctgcagcttctggactgttcatcctccctgggagttcccttcatcttttaacgtatattctaaactgtaaaattaagccttacactgtctaagatgggcactagcatacagcatgctaccactacacaagagcccaggagtgctgcagatgccaacagatggcacgtacggtatgttgtgttaggaactaagcatgagactatttcatgaacaactatgcagctgaggaaatgaatgacctggaaatgaaaagaggaaggtcactgcaatgtgtagggtacaatataacaacgatttgtgttgaaattcttaaaaaaaatctggaaagatcagcaaaaatctattgagagcacatgccctcagggcacagactgggagcctggggtgaggaggtggaaattttctttttttttttttttgagacagggtcttgctctgtcacccaggctggagtgcagtggcacaatctaggcttactgcaacctctgcctcccaggctcaagcaatcctcccacttcagcctcctgggtaactgagaatacaggcaagtgtcaccatgcccagataattttttatttttttatttttagtagagacagggtttcaccatgttgccaggtaggtctggaactcctgggctcaagggatctaccggcttcatccttccaaagtgccgggattacaggcgtgagccaccacacccagctagaggtggtaactttttattgttattgcttttgccctggaatattttatcatcagcatgtatagcatttgcactaaaaaaattaattttctacaaagccatacaatggaactcaaacaagcagtcctttgaaatcattatggtgtggtttaaattaaggtttcttagccatggcattgcgagcacatggggctggatccttccttgcggtggtgggggtgtcctgtgcattcaggatgttaagtggcctccctggcctccacccaccagacgccagtagaaccccttcccccagatatgacaaccaaacacatctccagacactgcctaagcgttccctgggggtcagaatcgcccttgagtaagaactggttttaaggtgtggcaggcccagtctgatcccctggccacaccagcattcccagcttcatgcatggccttcaacccaattagatggggaaagactagcaggctggctctagtgtgcctgcttctcaaccacgcctgggaagggcatagcgcgaattctcacaaacatctacaccaggagtggcaaattgtagctcataggccaaatccagcccgcttcctttgcttgtaaatagttttattggcacacagctatacctgttcctctatgtctggtctggggttgtttttaatgttacaaacagcagagctgagtcttcttgttgatgttgttgagacggtgtctcactcggttgcccaggctggcatgcaatggagcaatctcggctcactgcaacctccgcctcccaggttcaagcgattcgcctgcctcagccctgcaccctcaccccaagtagctgggattataggcgtgtgccatcatggccagctaatttttgtatttttagtagaaatggggtttcactatgttggccaggttggtctcgaactcccgacctcaggatgagtcctcacagcctctctaagagtcttgctctcagagcaccagtgggaaaacagtcacatagacaagaaactgatgtcacaaagcagtaccatgatggcaatgtggcttttctctggggccacacagggaagaaatgatctcccctttgctccgcatccccactcacctccccacatccccccagtctgtccttatgctccaactctctctgctcactgcttctgacccttcccagaaaggaaagaaggaactttaacttagcacccatggagacaaaatttactgccgcgctcatcactgcccgaggaccatggctgtttcgcacctttgcttttctggagcaggctggatttccttccaccttcagacatcttccctcgggtctgtgacccatctcctgcaggagcctgttatgggaacacatgacactcagaggacaagacatcctcccttcacaacaacgggccctgatgcggtctgcactgtgtttcgtaactgctcttactttgaggcaggggagacatttaaagaggtttgaaatcttacctcatatacacaggacaaacaaattttgtcaaaatgtagatgctcacttgcagagaacataggaaactaccaaaatgtttgctggtgattattgacatggtagattacaggtgactgatttttttctagacacatttaagtatttgctagttttccagagagaacatataactttggtcatcaggagaaacaaagtttttacacatatgttgtcaaaaaatatttttttaaagaaacacatggagcactggccttctaataaccaaaagcaaaacaaaaatcttataaagagcaatggccaggtgcagtggctcccgcctgtggtcccagctactcaggaggctgagttgggaggatcgctcgggtccaggggtttgaggctgcagtgagccatcacaccactgcaccccatcctgggagacagagcaagaccagagcaacgacatgacgacgcacagacaccactctcattcaatatcacagtggaggtcctcagataagaagtaaaaggcaaacaggttgaaaaggaaaagtaaaactctgttcttacaaacgtaatttttcatgtaggaaatccccgaacatcttcaaaactgctattaaaattagtaagtttaacaagagttttctttcaattttgtgtgtgaacttgactggatatggggtgccccagactgaacatttttgggtgtgtctgtgagggtgtttactaatgagatcagcatttgaattggtggatgcaataaactgccctccccagtgtgtatgggcaccatccaatcccttgagggcctgaatacaacaaaacagtggaaggaggagaaattcataccttttgcttcctgcttgcctggttgagctgagacatcttaccccatctcctgacctgtcctcaaactgggacttacacctttggctcccctggtctcagcccttcagactcacactgaactaaaccaccaaccttcctggctctccagtttgcagacagcagatcctgggatttctcagcctccataatcacatgagccaatcccgtgtaaataaatctccttttatatattcatatccttttataagcctctcttattggttctgtttctctggagaactctaatacagcaggggtgcaggacacacgatcaatatgtaaaaattcatatttctagcaatgaagtagcaatgaacaagtttggagattgaaattaaaatagagtaccatatacaatggcactaaacaccaaatgcttagttataaaccaaataaaatatgtgtaagatctataatctggaagctacaaaacaatgttggaggaaatccaggaagatctaaataaatggagaagcataccatgttcatggattgaaagactcgcttttattaagaaggcatttgccctgatttatggattcaatataatcaaaatccagcagatattttgctagaaaatgacaattctaaaatctctatggaaagccaaaggaacgagaagagactaaacagtctcggaaaagcacagtgagaggtctcacattacctgttctcaggacttagtgcaaagctacagtaacctcagcagtgtggaactagcataaggatgcatacatagaacaatggaaaagaacagagcccagacatgatgtgcacatacatggtcaactggtatttgacagagatgatgagagaatacaacgggaaaaaggaaaatcatttcaataaatgggattacaacaactgaacacccatacatgaaaaaacgaactttgatttaaacatcacaccatacacaaaaactaactcacagacttaaaagtaaaacctaaactacaaaactcgtacaagaaaacaggagaaaaatctgtgatcttggattaggtggagatatcctggataagactccaaaagcacaatccacaaatggggaaagtgatcaaatgggcttcatcgaaatcgtcaactactgcctcttaaattaaagcacttaacagcatgaaaagacaagccagactagaagaaaatatttgcaaagcaccacaaagagctggtatccagaatatagaaagcaccctcaaaactcagtaacaagaaaacaactcaatttaaaactggacaaaagatctcaacagacacatccgcaaagatacaggaatggcaaataagcacatgaaaagatgctcaatatcatcggctattatgaaaacacaaatgaaaaccacaatgaagtatcacttcacacccacaagactggctagaatgtgaaagtaacaacttgcacttttcatctatgtgcctagtgggaacataaagatggtgcagccactgtggataacaggtagtttcctgttaccattatatagagatgttttcatctacaactcatggcttgtaactcctataaacccttgttacagtaagcaggatctctctgacctcccacactcctttcacctgccagagagggtcctgcctcataccccagaggaaaaaacgcaacagaggccaagaagaatctgaacagacaggacttgctgggtttaaagcatgccctttttgaccaatcacatttccacagggctgtccatgcttcaatcgtgcctaagtcatgaagactctataaaaacccaaaggagctgggcgtggtggctcatgcctgtaatcccagcactttgagaggccgaggtgggcagatcacgaggtcaggagttcgagaccagcctgaccaacatggagaaaccccgtctctactaaaaatacaaaattagctgggtgtggtggcatgcgcctgtaatcccagctactccagaggctgaggcagaatagcttgaacccgggaggcagaggttgcagtgagccaagatcgcaccactgcattccagactgggcgacagagcgaggctctatctcaaaaaaaaaaaaaaaagcacagagcttggagagacttcagatcagatagctaacacgtggagattcccaaagggtggtatgcccgaacaggccatggaagctctgtgcgccttccccccatatctcactctacacatctcttatcttctaaaaaaaaaaaaaagagacaggatctcactgtcactcaagatggagtgcagtggctcactgcagactcaacctccttggctcaaatgatcttcctgcctcagcctcccgagtagctgggactataagcactcaccactacgcacagctatttttatttttttgtagaggtagggtcttgctatgttgcccaggctggcctcaaactcaggctcaagcaatcttcccaccttgacctcccaaagtgctgggattacaggcctaagtcaccatgcccagccacttggctaatgaaaaaaaaaaaatttcagagacggggtctcgcccatgctagtttggaactcctggcctcaagcaatcctcccatttcgacctcccaaattgctgggatttcaggcatgagccaccacacttggctccatctgtatcctttataatatcctttataataaactggtaaacctaagtgtttccttgagttctgtgagtcactcctgcaaattaactgaacccaaagaggggggtcatgggaatcccaacttgaacttggttggtcagaagttctagaggcagaagaggggcagtcttggagactgagccctcaccctataggttctgatgctatttccaggtagtgtgtcagaattgaattggaagatacccagctggtggctgctgcttgctggtgggggaaccctcagaagtcctgtgttgactgttgttgagtgggagaataggaaacacagtttgagtttttctacgagccagcaatcctcctcctgggagaaataaaaccacgtctacacagaaaaatacacaagaatgtttacggaggctttattcataatcaccaagacaggaaaccaactgactgcctgtcaatcaatgaacagatgaacacaacgtggtccatccacttgatggaatactattcggccataagaaggaaccaggccgggcatggcggctcatgcctgtaatcccagcattttgggaggctgaggcaggtggatcatttgaggccaggagttcgagaccagcctggccaacatgctgaaaccctgtctctactaaaaatacaaaaattagccaggtggggtggcacacacctgtaatcccagctactcgggaggctgaggaaggagaatggcttgaatccagaaggcggaggttgcagtgagccgagatcgcactactgcactccagcctgggcaacagagcgagactccatctcaaaaaaaaaaaaaaaaggaaggaagcacctacatgcaatacatgcaacacagaggaacttgaaaggcactctgctaagtgtcaggagtcagaggcaagggctacaaactgtgatgccacagatatgaccttctaaaaaaggcaaaaatgcagattcagaaagccaatctgtggttgcctgggggtgggagaggggctggtcctatcagagcacaaggggatttagggatgactcgttctgtagcttgattatagaggcggttccatgactgtctatgtctgtcaaaacaggcaagaccctatgctgaaaagggggatgctgactccatgtaaatgacaccctgatttttaaaatggggggaaaaacagaaaagatctaaagggctaaaatgttacagcacgcagacacacgggggcgctgtaaccaagtcttggcaacaacatgaaaatttggagcgtggaagactgtgaccctttgttgaaaactgctctgagaagagtatctgtttgtgcaaaggtatcctcttttctcaagccgaatcttaagtcacagggtcgagaacccaccagccacccagagtggaagacaggcagtgggaatttgacttaattttatcataaaccaagatttggaaagcagagggaagaatccaaccttgacttcactgaaagaaaatatataattgtataatctactgattgctcccacgaactctcacacaaagcacgttctcacgtggttaaatatctttcatgccattactttcaatggtttcacgatatttcatggtttgcctacacaatagttcactaaactcttactccaattcggagtgatcgaaggatgtcatttttcccatagtttttctctaaaaacctgtttttttattttattcttttttttttttttttttttttttgaagacacgggtcagggtctcgctctgtcgccaaggctggagtgcagtggttcaatcttggctcactgcaacctctgcctcccaggttcaagcgattctcctgcctcagcctcctgagtagctgggattacaggtgcacgccactgcatccggctaatttttgtatttttagttgagacggggtttcgccatgttggccaggctggtctcgaactcctagcctcaagtgatccgcccacctcggcctcccaaagtagctgtttttaaataccagccagacaccaagaactgtgtgctgggcactggataagacagcttcagaatccagaaagcgaattaactgggttgaaaggcaagaacaggctgggcgccagggctcacacttgtaatcccaacattttgggaggccgaggcgggagcatcacttgagctcagtagctcaagatcagcctgggcaacatagggagaccctgtctctacaaaaacgtttaaaaattagctggtgtggtagcacacgcctttcgtcccagttactcagaaggctcaggtgggaagatggcttgagcctgggaggctgaggctgcagtgagtcgtgatcacactgcactccagcctgggcaacagagagagaccttgcctcaaaaacaaaaaaaaagggtaagaacgataccatgtttcaatggagatcacagcttcgtaaaagagatgcttatagccatgagccgtcgatgacagactcacaactggcagcatgaagggctgatggtctcaaaagcacctgagtgaagatcccaaaatgcttccttcaggaccaggttgtgaccacctcccatgactagtttcggaattccagttgctcagaaccttgctcagaactgctgcaaatggaagctgggtgcggccttaccttttgggttgtcttcttttcatactgcagataccgggactcaatcactcttccacctgtggggacacactgttggtgcacaacaaaactacaaaggaccgaagaccccacacacccagaccccacgccccggagacccagatgccaggggccctctccactcagtgaccagaacagaggaggtcaccactcctcctgctcgcctctgatcacgtccttcggcagcctcaagcatgcatgggacgcctactgtatgcaagtcccaagccatgtgtggagtcacagagttcctgaggaagtaagatcaaggaacaccctccaaggtcaaagctgcaagtgcactcagacaagcgggagggaaagaagaaagagctttcactgacggcctccaggtggcttcctccttcctcccatctcgtgtgaccccaatggccccttcccccgcctgtgtgtctaggactcactcctggtactaccttttactccccccgccccttactcagtttgggaccccctgccctgagacatgcccaacacccaggccctcttcagacagagccaaatccctagtgacagcccaaccccaggtccccttccagggctactcctgggagcgtgactgtggatggaacaaatgccacctgtcaccccagcttctggaggtaggggtctgaactggatccggttagtcccattctgtcccccagccctctcccggacccctccctcaaaactgttcctcccacctcctacgccaggcccaacccttggtctcagcaggtgacctgtttcctccttcactgggaagacagaagtggccccaggagaccctcccgccaccacatccagccacctccagtcctgatggctgcattcccccggccctgtgaatggacctttgtgctcccagataaagcgccccccattctgggcgctaaagcccagccctcacttccaaaaggaaatgccccgcaactcccacctccctgcctgaatccccacagctcctctctccaccagatgctggaggtcattcttcctcctacctgcactctctgcctccccccatttctcccatccccttgacagcaaacaccccaagttctttattcaccagctcccctttctctcctttctccttcccttgaatcccgccccccacaatccagcttgcagacacaccaccgcaccagaacacctttggacaagaccaccgtgacctcccttgctcctgagcccagcagtccattctcagtcctggtcatctgaaccaccaggcacaaccactgctcgttccctgcttcctgaaaccttccatcagcctccaactgcccttcagggctgagacaggctggcgtgctgggtccatgggctcaggaagcctaagtgcctccgggaaccttctggaccctgtgccaccaacaacttgcctctaaccttatcactttgtcacctctcacttgctctattcagccgctctgccgcgtggacccccttgctgtgcatccccctgcaggcacctccctctctcaaggctctgctcagttcagaccacagcacacttgtctctgcctgccatttcgtcacagcatctgtcatcatctagcaaccccacagcctccttacggttctcatgcaatgcccacctcctccctagagccccaggggcccaggatttttgtctccttcgctcgctgctatgttccaccacctggtacggggtaggcactcgataatatgtcaaatgaatgattctaggccaggcgtagtggctcacgcctgtaatcccagcactttgggaggccaaggcaggcggatcacctgaggtcaggagttcgcgatcagcctggccaacatggagaaaccccgtctctactaaaactacagaaattagccaggcgtggtggcatgtgcctgtaatcccagctacttgggagactgaggcaggagaatcactggaatccaggaggcagaggctgcagtgagccgagatcgtgccattgcactccagcctggcgacagagttagactttgtctcataaaaaaaaaaaaacggttctgcattgtatcggtgccatagagctcagaggtttgcctttgtactgaagaggcccggggagagtgacatgctcaatgtcacacagcttgagagttcagccaagtgagattgtgactttgaccatatctttgttccagttgattcttctgttggggactggggttgcagctgctaccctgagaggaaaggaggtaccctcagagttaacaaggatccttcagtcagccaaagggccgggctgtcaatctgggcagccccagggtaggaatgcaccatgcctgcagagcgagtgtgggtgcaggtgggtgcccggcagatgtggacaatcggaaggccactctcatggtgcaggtctccaagggctgaggccaggaccaggtggggtcccagggacaaccaggccacaaaaagagtctaccctggatggtgatcgaacagctgagagaaaggacatccccagctcccagcagaaagaccatccagcccgggtctttctagtagcatcaggaaacagttttgctcaacaaggaggatctcaggcttgggctgccttggacggtggggaaacaaaagcactttcaagtttcctgaaaactaggatacaactgtttattttaaacagcctggctaggtgcggtggctcacacctgtaatcccagcactttgggaggccgaggtggacggatcacttgaggtcagaagtttgagaccagcctggccaacatggtgaaaccctgtctctactaaaaatacaaaaatgagccaggatggtggcagctcccagctacttgggaggctgaggcagagaatcgcttgaacctgggaggcgggagctacagtgagccgagatcacgccactgcattccagcctgggtgacagagcgagactccatctcaaaaaaataaatacaaataaataaacaggctgaattttccacagaagcaatattatgaagaaggatacaattcttgtccaagaacgaggtagctcataaatattatagctgttatatgcgagattaacatgcgatgtttagaatttgggaataagtggtcaggaaataaaaagacaacttacccagcaatgctgaaacatacaaaccttgcctcacttggaaataaaatcctgctctaagctcgctgaattgggccctgcgacactgcacacactgagaaaatacctcattgtatcatagtcttggcctccaatgatggactctagaatctaccatgcaagccgagcatttcctttttttttttttttttttttttgagatggagtttcgctcgccacccaggttggagtacagtggcgcgatctcggctcacagcaacctccacttcccaggttcaagccattctccagcctcagcctcctgagtagctgggattacaggcacctaccaccatggccggctaatttttgtatttttagtagaacgaggtttcaccatgttggtcaggcaggtcttgaactcttgacctcatgatccacccaccttggcgcctcaaactgctgggattacaggcgtgagccaccgtgtccagccacatttcctttttttttgttttgttttgagacagagtctcactctgtcgcccaggctggagtgcagtggtgcgatcttggctcgtgggggaggccgttaacggtgatcccagaccgataggtggaaatcagatgtacaggcacccctcatgagactgacacgctcacgcagtgggaattgagagtttgattttaggccgggggcagtggttaatgcctgtaatcccaacactttgggaggcagaggcgggaggatcacttgaggttaggagttcgagaccagcctgggtaacatagtgagaccccaactcaaaaaaaaaaaaaaaaaaaggcagagtttgatttttgataatgatctccatggtctccacacccacgcttccaggggacatgtcccggacacagcccatgacccccatggctgccaagggaagccactgctcaaaatgaccaccaccattcctgacacagccctcgccacagggctgggatggccagacccagaatccccacaggtgtgactacaaggaagtaaagccacaggcccccttctctggcctgtttttttcttcctccaaaagcacgtaatgaaagaagaaaaccatgttccttaaagagatcctgacactgcttaccttgaactcttttatccttcttcttggcactgctagaatttgtggggccggttgcaggcttcctgcaagagaagagagagaggtcttgttcacctcactacccaagaagcacagggaagccggcgaggtgcctctgctagttgaagctcagacagcccagtccaagggctgccagaggacaatttcagtgagggtgggccacctcaacaggaaaagggacacaaggagcagccagccctggtcacctgggcaagaaggcataggtgaacacccaaactgagaagagaggagggtaatgagagctctgtggaagagatcacagcagatctcaaattatccctgggttcattcattcaccagacattgatgcacctactatattccagtagagacacagtggtaacaaaacacagagctccttcccagaaagggaagaacaacatcttgacaggcaggtacgaggagtggtcccagcaggtacctcactttgggaggctgaggctggcggatcacgaggtcaggagatcgagaccatcctggctaacatggtgaaaccccatctctactaaaaatacaaaaatgagctggggtggtggcatgcgcctgtagtccctcctactcaggagactgacacaggagaactgcttgaacccgggaggcacaggttgcagtgagccaagatcacgccattgcactccagccagggtgacagtgagactccgtctcaataaataaataaataaaaataaaaataaaaataaaaatagaatgaagcctgatgtaataggaaagaagggaccctgagataggaatcgctgactcatcagctgtgggggtgcaggagagggagaatctgggatgactaggggtttcagggtttcagcctgagctggtgagaaaagaagggatccaagaacagacaccagcaacacaggaggggcaagtggatgggcaagtggaggggcagggccaaggccagggcactgtaactcctgctcccatcaccaaaggcggctccactggtccctgcggccacctcctctgaagcaggctcccaggaccccaaagtgagacccagacaatgttggggacacttccaggccaccgtggggagaggcaacttagcaaatgttcgccaggtgccagcagctgcgctcgcccgtaggctcctcctaacccgacagcttcctaactgttcacacctgctttttcgtcgctgcaaaacaaagacgcacaggttttacataggtcacccccggggcagtctcacagccagaaagagacaagagcacagactccctctggggactgtgctagggctgtggcctcaaaccgaatgggctcctgggtgaacctgctgcgacctgaggggggtccctacaacctgtgcgagcctcagctactgcacctgtacctgggaggtgctactgtcaatctatcggttacggcaaggggcggtggagtgattcctcttgctggccaatttcacttcagtttgcacctggcacaatcaacactggcagaattaacaaaactagacaaatatagcctcatgatcattcatgcctagctctcggtcagtattcaacttctttcttgttcatggtgtgttaccctaggcaagtcacttcccctccctgggtctccatcatctcctcagtaaactgggagcacagaataaagcgcgtgggaggattaaaggggacactttggtcgcccaacacttgttcactgcataacgataattccaagagcgacatcacagtaaagacccaggcgccgatctaagcgcgtttcagcctcacgcgacgcctacgaggttgagctgcgtcatcggccccatttcgtagcggaggaaagcgaggcactgggcggtcaggccgcttgccggaggtcgcccagcgtcccagccgaggacgcggaactcagggccggtcgggtgtcagcgctccggagcatgcgcagaggcagcacgccatcggggtcttcaggggcccgcgcagttcctggcggggtcgaacccgaactcaccccgagggtcctaactccccacctccgctgcccatcctctccagccctatggcgtctacaaatccagacctgcggaagccccaactcacccagcgcctcgccccgaggaatccgccattttcccgccttccacctcaaggcccgacccgccggcttttcaaagccggacccgcccccttgcttgcgggtcggaccatttgtggagacgcaggaggggtggctgcgaggcgtgaggcagcgccggctaagtgtggagagcgcggccccagacgcgcgcttcgcctgtcctcccctcgcacttggtctcgcccaccatcggcggtagtgggtaggggcggtgggtgggacctgatctgtcggacagtaggggcggggcttttcgcgatgccccgcccctaggagcgctggcgtcacgcccccgtccccgcctctccggaacccggaagcgggagcgcgcgggggagcggcgggcgcggcggggcggagcggctcgagcagcggcgggctggcaggcggtcgtccggccggggacccggcccgggaccggcggcgcgcggcggccgaggccaggtgagtaccaggcagcctcgggttggcgactcgagctcgaagcctgcctttgggggctgcgcagaagagggacggagctgagggctgatgggggacgcgacggcaggggtcgagggggcgggaacgagcctgggggtcttggagagattgctggggatgaggtggaagcgagacggtgaaggagaaagtggatggggatggagctggtgagggagttcgagggcgtggggggggtgagtcttgtggctttgagcagcttctctgaagaggacgtggcttaagtggtaattggggggtcgcaggaaacggcgttgtggggaggcacggaggcgggaacgagaggcccaggctgggggagtgggcaaggccaggggcgggacagccggggtgcggttgaggggaaggggtgcgagaccgatctggggacgtctgcccgcgcgattgaaggaagggtgtctgagaagagggcggcgcctggcccccagtgggcgctcagtaaatgcggggggttctgaactaactgatgcggcagccggctattgggaagcggggaaatgggagctggaagggaagtaaacggagtagaagtcacggtaagaactgagggtaggcttagggagggagggcccggagaggagggaagagaaggaaggggttagagtggccccgtgcagatagatgttgagatgcagcccctggagattccgtccccccaccctcccctcttgattcgtgtccctcctgacttcacacttaacagctgggtgacctgggacgagtcccaacaccctctgtgccagtgtcctcgtcttggaaacttcaccaccctccccttaagacaggactagcaggattctgggattccctggatccaaggaagggacctcagggccggttgtggggccggaactgtgtttcaggagggagtgtgcatgcaccctcatgtacaggactgtcgccacctccgcagagctgcatccttggacttaaatgggtaaaacgacatacaggaaatctgtcccccggttgctctgagctcagccctggagaggcacgacagccacgagccctcctttctttcctgggcaccctggaggccaggggtctttaagggatggcttctctgcctctttgtctgaggtgggagcccgtggggacactttccagccagagagtcccaactcggtttgttttttgatgttggagtcttcagaatcttaaggtgtccaggagcagccggaggtgacctgggctacaggaaagttattcacatctgacaggcctggctcttgtggccctggcagggactttgtgcagggtgcttttgattggcattcatttctcccctttcccaactgtagggatctttatctgggatctgccagaagggctggggaaccccagcttatgtttagtttatagctcattcaggagatgaacccggatagctggaatataaagagggccacagaaagataagcacccccttcacttccagaatatcctggcctttaggaaaggtggctttggcctggcttgccccaggacatgcagtgacagcccacagtcatgcctcctgcaaacattgaactgtaggcttgcactggcctacagaacaggaccgggatcttctgatcccgcagccctgcaatcgcctcttccctgccgctagagaatggccaagcagggtcttgtggggggagcactgtgttggagatcctggctttggtcaagtctctgtgcctgtttctgacctctcacctgcaaaatgaatgaattgacctccatcagcgtttttcaaccttgaaacccaactcttctcatcaccgtcttgtctccagtccatgtcccccagctcccggccttgaactcctcacagcacccccactctccattcctggctgcgatgatcctacttttattccgttttccattcgacagtttgtatccaaaaatgattttttttcaaccgcttcttcatcgtccaaatagaaaattgcggtgttgaaggtgcttttgcacattgcacctattcccaaagctttggaaactgcaaatttctggaaatcccgaggcagtaccgtccctcgggtccagtctggtgactcagtggagcaggtagagacgtgggaatctcccctttctgtttggctgtaggattcgttattctctccccacatggacttgttaacttgctgcttcccattcctcatctcttccaaatggtgtgtcttgggtgggcctagatttcagttaggcaagggttgattgtgccagacacttggtagattcctggggacagaggtgaatccttatgacccagaggacggacacgctaatgcccgcccccgacaactttgcacttcctcttcagaaagaatggagttcaagctgggccgcggtggctcaggcctgtaatccctttgggaggccaaggtgggtggatcacaaggtcaggagttcaagaccagcctgaccaatatggagaaaccctgtctccactaaaaatacaaaaattagcccggcgtggtgatgtgcgcctgtagtcccagctactctggaggctgagacaggagaattgcttgaacccaggaggcggagtttgcagccagccaagattgcgccattgcactccagtctgggtgacagagcaagatgccctcaaaaataataataattaaaaaaaagaatggaattcagatcaggtcatcagtacggtgacagaggggccacaagatattatggggggagaattagggacaaccaatgcaagctttaggacaagggggattccagcaagtttcctcggaagtagtggctggccccaggtcaaacctggaaagataccacgtgttaaaccactccgggtggaagggattgcacaagcagatacctttgaagcccggcctgtacagggcatcccagctctctcattctgccaaccggcagtgcgagggtccttgttcttatcttcctgatacagaaacaggcccaggcaggtgatgacttcagagatggttccttgagctttctagaaacatgcaggatccttagtaacctttaactggggaaacccaaatctccagggccgtttctcacccgcatcaccattgacagttggggctgtgcactgtagaatgtggaatagtgtccctggctgtcacccatgagatgccagtagtattccatcccctccaaggggtaacaactgaaaatgactccagccatggccacgtgtcccctgggggcagaatcacctcccccgccaggtgaaatgtgatgctcattagtaaaacctggttcccctctagggcccatcattgccttggtgggtccttggtgtttgtggagcccctgaggaactgccactaagagtgggaacaggggcagagaccaggaactgaatcctgccatccagtcagttcttaatcaggagggagcgggtcttgataaaaaggaggaaccgttaggaacggactgtgggagggtaggcaacgtgcccgagggtggacagcgggtgcccttgtcttttctttgtcttgtgactgacctggatttctggaggaactgtcctcgtcttagaatgatctgttgcttttcttctgagattagaggtattagattctctcccaagagctactttggaggttgccccggataaacgtcgcttttgtaagctgcattatctcttccatgggccctttcgcccgcccgttcccaagcacatactgctgaatttttgttcttggtccatcttgctgtccccttccctgcttggccccctccttgaccgtgactttgctgctttaccttgattggaggagacgctctggggccacgggactgacggtcccttctgggtgctgcccccacaccccacccaccagccctttgtgtgcccggcatccccagcccagctgtgccaggctgcccctgctcggccggccattcagacggccccaggcggcctctcggcaaagcaagacaagcccttctcttctgccctcgtggtccctggagtggcagaacaaagggctctgtctccacaccagcccaccgccgcagcccagagccccgttccctttcaatttctatcgtggctgggaaagagcctcagagattaggcatgtttcagaaatgcagctgacgagtttgggttctactcatttcctcagcgagactttctgagcccgagcccgatgataaataaagtagtgattcaagggttcagcccatgggttcgtcggagtgatgaataagatatccttgtctgactcacttgtttaaaacccatctctgccctgctgcacagggctgtatgtgcaagagaaggagccccgctaggggtgtttcatgactgttgttgctgggtgcctgagtttgctagggctgctgtaacagaaccgcacgctgggtggccagaacgacagaagtatattggcttgcagttctagaggccagacgtttaagatcacattcaagatcaaggtgttggcagggttcgtgccttcggagggctgtgagaatctgttccacgcctctctctgttggctcatacatagccgtcttcccctgggtcttcacatcgtcctccctctgtgcctgtctctgtgtccaaatttcctcttatgaggacagcagtcatatggaagggggcccaccctaatgacatcattttaactgaatcatccccataaagaccctgtctctaggcgaggcttggtggcacacgcctgtaatctcagccctttgggaggctgaggcaggaggatcacttgaggccaggagtttaagaccagcctggacaacatagcaagatcccatctctacaaaaaaatactaaaattagctagacatgatggtgaatgcctgtggtcccagcactttaagaagctgagacagacagatcgcttgagcctgggagtttgaggctacagtgagctatgatcatggcactgcattccagcctgggtgacagaacgacacccccatctcttaaaaaaaaaaaaaatcccaaatatactcatactctgaagttctgaggtttaggatttcaatatgtgaatatttctttgtggaggggagtggtggacacagctcagcccataatactgagaaaaggacaaattcaaattacatttttatttatttgtttatttattttgggggcgggggcagagtctcactctgtcacccaggctggggtgcagtgacgcgatctcagctcactgcaacctctgtctcccaggttcaagtgattctcctgcctcagcctcccgagtagctgggactacaggcgtgcgccaccacgcccagctactttttgtatttttagtagagatgggctttcattgtgttgaccaggctggtcttaaactcctgacatcaggtgatcagcccgctcggactcccaaagtgctgggataacagatgtgagccaccgtgcccggcctcaacttacatttttagataatataggaacctggagggaaatgatcgtgtcaatagagaataggtccattttgtctcttctcactcctttaaataaacactttaagggtgagcaggttggttggccacatcaattttggacgctccctgttttccagatctcacactcatacattcaggggtgactaaagagaggtgagaggcctggtgcagtggcttacgcctgtaatcccagcactttgggaggccgaggtgggaggatcacctaaggtcaggagtttgagaccagcctggccaacatgatgaaacccagtctctactaaaaatacaaaaattagctgggtgtagtggcacacacctgtaatcccagctgcttgggtggctgaggcagaagaattgcttgaacccaggaggcagaggttgcagtgagccgtgatcttgtgccactgcactccagcctgggcaagagagtaagatcccatctcaaaaaaaaaaaaaaaaaaaagaggcgaggacccagcccagggcggagtgggtcccatgggattttacaggggatgtgttgagggccaggtccacaaggctgcgtgtgcctggtggggaagcaggatgaagtttacaaacagggcatggggcgggggtatatctctgttctcagtattgccagggtcaggggcaaggaatatccaaaagtaactacactcttggacccaagtgaccttaggaccaactgctgtcacaagtgattgaacaaaagaagtttctggaaggtcttaaaatccttcagcaaaaaggaagtattggctgggagccaggctcagagctggcccttggggagactgaggagaacagaaatagccctcgcctctgttcagatgttcagccaggagtcacgagcatggaagtcaaattaacagcccagtggggtctgtgaaggtgccggcagcaggcgagcctgtgacgggagcctgcctggcctggggactcgcttatgggggaagtgggagacctgagagcttccccagtcagccgtgccctgggtcttctgcctgcgaggtgggcaccgctgcttcctcacgagtgaagtcacagcagcacagcagcagtgggaggctcaaggctttgctgtggatcttcctgggctcactgctcagagcatctccacgaggaggcgtctgccacctcctgcatcccattccagggcagacgagatcgggggcaggagggtgacatttgagattttgattcccagggtatgggtactcacgtggggctttaatttcctggtgaatgtgccatggggggcaaggggtagcttgcccactgcttgggaagacccctggggtccttgtcttgtcacgtggagatgctgtttattgggtaggcacaagaacaagagaggcggagaaagtgtgatcgtacttatttggcccataggtgccgtggaaactggttcctttcccctgggtggtccctcgggagtcaggcccatgatttagcagggaagggagaaggtaagggttggggtgtcctggagtgcagaaagtggcctgaaccggggcaggtacgtcctcaaggctggctccctcttgcactccgcactctcaatatcctgcagccaagtgagcgtggggttggaaccatgctaacatgtcaagtgcccgtgggtcctcgaggaggctgaaagtgtgtgaatcttgcttttttttttttttttttttttgagacagggtctcactctgtcacctaggataaagtgcagaggcatgatcttggctcactgcaggcttgacaacctccctgggctcaagtgatcgtcctacctcattctccctagtagcttgggactacaggctgtcaccaccacgccaggctaatttttgtattgtttatagagacagggtttcaccatgttgcctggtcttgaactcctgggctcaagtgatcacccgcctcagcctcccaaagtgctgggattacaggcgtgagccaccacgcccagccacttttctgattgatttaaagcatatcttctcagctgcagcattggtgacattgggggcagatcattctcttgggtagcagctgccgtctgcactgtagggtgttgaacagcatccccggcctccacccttcagatgccagtagcaccccctgctctgtgtctggataaccagaaatgtctccagacatggccaagtgtctcctggagggcagagtcagctctgggtgagaaacactagttccgggttctgttgactcctaagtgactttgcgtctgtcatcatctgactgaccgaagtcctaggatgctgccctcttttttttttttttttttgagactgagtttcgttcttgttgcccaggctggagtgcaatggcacggcctcggctcactgcagcctccacctcccagcttcaagttaccgattctcctgcctcagcctcccaagtaggtggggttacaggcacccgctaccacgcccagctaatttttatatttttagtagagatggaatttcaccatgttggccaggctggtcttgaattcgtgacctcaggtgatccacccacctcagcctcccaaggtgctgggattgcagatgtgagccaccatgcccagcccgcacatttaaatacacaaagtgaatggggaaggagagaggagagaaatcagagaggctaggtggattctcctggttaataaccctttgggttaataaccctttgggggccaagtgattacatgcctgtaatcccagcactttgggaggcggaggtgggaggatcccttgggcccaggacttccagaccagccttggcaacatagtgaatccccgtctctacaaaaaagatacaaaaattagccaggtatgttgacacatgcctgtggtcccagctactcaggaggctgaggccggaggatcacttgagcctgggaggttgaggctgcagtgagccaagatggtgccactgcactccagcctgggtgacagagtgagactcatctcaaaaaaaaaaaaaattattgggaatgtattctgtgtattctggtatttagtgtgaggaaagaatcaatttttttccaaataattaatgtagggtctctcaccctcagcactgctgatatttgtggctgggtccctctctgtggtgggaccctgagcaccacggggtgtggaccagcatttccagcctcaaccttcttcatgttggtagcatcctccctgtcccaacaacccttaatatgtctctgggccaggcgcagtggctcacatctgtaatcccaacactttgggaggctgaggcaggcagatcacttgaagctaggagtttgagaccagcctggccaacatggtgaaatcttgtgtctactaaaaatacaaaaaaaaaaaaaaagaaaaaaagaaaaacacacacacacacaaaattagccaggtatggtgtggtgcacctgtaatcccagctacttgggaggctgaggcaaaacaatcgcttgaacccgggaggtggaggttgcagtgagccaagatcatgccactgcactccagcctgggcaacagagcaagactctgtctcaaagggaaaaaaacatgtctcgggacagaggttgccaagtgtccctgaggacagagtcagctccaggggagaaacaatgatatagaagaacaccaagcttttgaggggcaagcagagcctgttgagacctacaggtcaagcccgtgactggcctgaggtgacttctttctcccctgcctttgtggtgtgatcaccagggtccctggcacagggatgagcttcaaggggagctggggagtggctgtttcaccgaagacactggtggcagcaaatcctgagaccattgtcccccaccatccagttccgctctcaggtgatcagaaaatggaacgagctccctgtgtcctttgtagaaaccaggcagagggtgggtttcatggccaggaggaggagcatctgtctgaaggccgcaagggctgggtcacagatgggcagcattgggagatcctggcaggcagagagcactccacgtggaaactagaagcatggggcagatggggggccaggtagcgagccacctaggcagctcagcagatgtggagaatgggaataaacttggggggtctttgggggaatcagtgggataggtgatagctaaaaggtacagggtttctttttaaggtgatgtaaatgttctagccaggggcagtggctcatgcctgtaattccagctctttgggaggctgaggcaggagaatcacttgagcccagaagtttgagactggcctgggcaacatagggagatcccgtctttaataaaaaaaaaaaaaaattgaaaaatttaccgaatgtggacttgcacctgtagtcccagctactccagaagctgaggtgggaggattacttgaacccaggagttcgagaccggcctgggcaacatagggagacccctgttcttaccctggggatggctttcctccgggcgtgacgacagatgagctgtgtgattgcacagcaggatacaagggtttttcctctgcccttccagacccgcgtccctggctgccctccctatcttcgttacaagcccacaggtcacccgagaaggacctgcagcccagccaccacccagtggctctgccttctacctgtgaccagaacccacctgtgtctcatgggcctgacccaggccactgtcagctcccgccaaggcacccacaggacgtgcttccaccaaggccccccagagtccatctgccacagatggtgacattttcttaatgtccctctggtcctggtgcccctgcatcaaaccacacggggctcccctgtcggacttgcatgaaaatctaaccacatttgcagggccctggaagatctgaccttccccatctcagcttctctctcccggcctccagccttggacccaccggccacactgggctccttgttctcagacccactctggccccgcctgcccattccccgccctcgcctgggctgctgtcctcaagctctgggcacgtccagctcgtttgcactgtacaggcctcagcaaccatttgccctgagcgccgccccacaggttcctatccccagcttccccaccttggcccggctcgtattggggccaattattttttgctgtgggggccgtgctgtgcactgtgggacactgagtggcattcctggcctccacctaccatttgcagtatcccctcgccacaagtggtaacttccaaaatgtctccatggccaggtgcaatggctcacgcctgtaattctaacactttgggaagctgaggcgggcagatcgcttgaggccaggagttcaagaccagcctggccaacatggagaaaccctgtctctactaaaaatacaaaaattagctgggtgtggtggcacacgcctgttgtcccagctactcgggaggctgaggcacgagaatcacttgaacctgggaggcagaggtaacagcgagctgagatagcgctactgcacttcagcctggaaaacagagcaagacttcgtctcaaaaaaaaaaaaagtctccagacattgtcagatgtctgtcccagcagggacagactcactgctggctgagaactgcagtgttagcacagttatgctggatttttcctccccaaagcacttatcactgttgctaatacctccttgctttgtggtgagtgtgttatccgtctccttcacctccccattctctctcctgtgcccagcatcagcctggcccggggtgagcactgaaggaacatttgttaaccatatgttgaaagaaggcagcctcctctgaaacatcagcacagatcacagggagggagaccccagggcctggaggggtgggcgtatagcacaggtcggagagcacttgggccacggggaggcgggtggccagaatgcgctgaaagaacacatacctgggaagggactttctccagggcgtggggtttagaacagtcaggccagatggaaggtctgggggaatgtcttggggaagacaagggacaaactgaacacgttcagaagaacacattcaactccccatgggtgagcgtggaattggcagaagtcacgagagagcatttgggatgagcttcttgggaatattcggctaaggcagaaaaaaggctggagcaaccgaagggctcacccagctaccttctggcctgagtgttccactcaaggtgttctgcactgggcaactggattcatgtcctggggcttccataactaagtacctatcctgggtggctgaggaggccacaagtctgaaatgaaggtgttggccaggcacggtgcctcacacctgtaatcacaatactttgggaggccgaggcgggtggatcacctgaagtcaagagttcacgaccagcctgactaatgtggtgaaaccctgtctctagtaaatacaaaaaaattagccaggtgtggtggtgcatgcctgtaatctgagctacttgggaggcggagacaggagaatcacttgtacctgggaggcggaggttgcagtgagccgagatcgcgccattgcactccaccgtgggcaacaagagcaaaactccgtctcaaaaaaaaaaaaaacgaaaattagccaggcgtggtggtgggtgcctgtcatcccagctactcgggaggctgaggcgggagaatagcttgaacccaggaggtggaggttgcagtgagccgagatcgcaccaccgcactccagcctgggcaacagagcaagagtccatctcaaaaaaggtgtcagcaggaccacactccctctggaggctctacgggaggacccttcctgcctgttctagcttctggggctccaggtgttccatggcctgtggccacatcactccaatccccacctccatctttattcacgtgccgccttctctctgtgtgcacatgtctcttttccttttataaggacgccagtctttggatttggggcccacccttgtccagtacaacctgatcttaactgactacatccccaaaggccttatttccaaacaaggtcacattctgaggttcgcggtaagcatgagttttggggagcacgaatgaactccccactggaaatgcctctctttgtaattttgccctgcggacgctgtttcttggccctgctggctcccccagctgctccccgaggagtttcccatccctgctctgtcccacccctaggacctggccccttagcagggcctgggccaccaatgatgcccaccaattcctgtgatgtcctgtaccagaccgtggtatgagcccattgacctctgcagtggattcttggaagcagccccacttactttgtttatttacttatttgtgtgtgtgtgagagagagagaaacaggatctgtctctgttgcccaggctggagtgcagtggcgccatcacggctcactgcagcctcgacctcccaggcttaagtgattctcccacctcagcctcctgagtacctgggaccacaggtgcatgccactatgcccggctcattttttattttttgtagaattggggggtctttctttgttgcccaggctggtctcaaactcctaggctcaagtagcctcccaaagtgctaggattacaggaataagccaccacgcctggccatatccccactttctgaaatgccccaaaagagcttagttcctccctcctgtcacctgcagtgggccatctcttggagttttcttaacaatttcttctcttgagtgtcctcttcctcccgactggcacgtgagcgtggccatcttatggttaggttgcaggtgtagaaaaatgaggacaaaggtctctaagtcgtcctcccactctgagccaccctgaccaataggctgactttgtggtcattccttcgtgtgtgtgtgtccatctttcccatactgcccatgagcgtttcttctaaaaaaaaaaaaaatcctcaacaggatcagggaaatgtacacaaaatgtgaaatgcactgaatgctgcacgatgcatcctaaatgagtctgctgtaatgctagttagccttcccttagcttgagaatgatttcatcctataaacatgtggcttcaaattatggccttatataaacgaaacggctacgccacactttctggaggccccgtccggaggcctttattctccagtaaattccgaatcctccgccaaactggtaggcagaaccctactttctgtgcagccggccttgagagcggctaattcacatccggccactgacccccacccccagggcctgttttttttcgttgtcatgcctttccttgcacctcctttctatgagaacacaaggaaaaggccctgaattgagattggcattttttcagagtgcagaaagcatatactggcctggttttacatagccatttctttttgcaccgctccgtttttttaaaaggagtgatcatttttattgtagtgaaatgcacataacgtgtaatttatcatgagtaacattcagtgcattcacagtgttgtgccaacaccagctctatctgattccagaacactttcattccccaaaaggaaaccccgtccccattagccatcactccccactcctcatcccctagctcctgacaacgactcatcactttctgtgtctgtggatttgtctgttctggcattctggacatttctataaatggagtcacaccccatatggtctttcgtgtctgacttctctcactcagcatcatgttttttagtttcatccacgttatagcatgaatcggtgcttccttcctttttttttttttttttttttttttttttttttttttttttttgagataaggtctggccctgttggccaagttggagtgcagtggcacaatcttggttcactgcagcctctgcctcccaggcccaagccatcttcccacctcagcctcctgagtagctgggattacaggcacacaccaccacacctggctaatttttgtgttgttttttttctgtagagacgaggtttcgccatgttcccgaggctggtcttgaactcatgagctcaagcggtctgccggccttggcctcgcaaagtgctgagattagaggcgtgagccgcctcactcagccttcattcctttttatggccaaataatattctgttggatgaatgggccacgttgtgtttttccatttatccgttgacaggcactttgttaccactttttggcatttcttcgaggatctttatagtctgacagtttgattttcatttggtgacaaggggattgttcttacacaaggccttggtcgtactgatgctgtcagctggaggatgtattttgcttcctgttcacattgtctgtgcgtgggatggtcatgagtcaggtggtagagcgggtgtgttagccttggggtattttggtgagacaattcggtttaaggaaggaaacacgttttcaggacccgtaccccaaaacacaaccataacccgaggtcgccacttggctgagctgtcccccacagggacttcaggtccctggttcctccatccccaatctgcttccttccattcccgccagaaccagggtattttccaagggcaggtttcacatccacttggggcagggatcttaagccacagtaagactaatttccaggtcccaggtctcctgggaaaccccaaaagactgagccctgccgagtgagaacattctctgaagctctgataatcaaaacagcgtggcacctcacaagcctcagcagcccagaggcggaccacatgtataaaataacgccatgtgtagtatttaacaaaggaggctccccaatccagggagggaaggattctttcacaaaaggcatgaaaacagttgcttccatgtttggaagcagttttgttttgttttttgtttgtttttttgatacatggtcttgctctgtggcccaggctggagtgcagtggcatgatcacagctcactgcagccttggcctcatgggctcaggcaatccccctgcctcggcctcccgagtagctgggattatagatgtgcaccaccacgcccagctaattttttaattttttatagagatggcgtcttgtggccaggcacagtggctcacacctgtaatcccagcactttgggaggccgaggtaggagggtcacttgaggtcaggagtttgagaccagcctggccaacatggtgaaaccccatctctactaaaaatacaaaaattagctgggtatggtagtgttcaggcccaggtatagggggtcagcccagagctgtgggtgaaaggacaggcccatggtcccacctgtgggagcaggagaggaccaggccgatgagccttgcagggggcacgccagcttgtggtcccagctagtttctgctcccaccacccccatcccactcccagggagggatgtcccttctagggctacccccttccctgcagccctggctgctcagcagccgccttgagcaagcccttatccacttcctcctggcctgggggcggggcacgcatctgccagtcctgtgaccgtccccttcagccccatctctgagagtggggtttcctgagagtctgcccttctgccccgcacaccaggggcccagagctgcagaagcccccacaggctttgttcccagcagggctcagagggctcctggtgctccatcagcagtccctggaggacacggagcagtctcaagtgcagccgtccatgtggccttcagcccttgtgattccatgagctagcatcagccgtcccctcagtgggtggcagaggctgccgggagcagaagaaagagcccatccttgggttctcctggcttctcgctcagagctgctctctgctgtgaaggaggaagtaggcatatcccagtgagttttgcgtcgcctacatccaggcagctcagccataagtcagcccaaagcccgccagctgggagctgcactgagcccctggtcacaaaagtgaacgtcacaggacgggccaactctgcccaggcctcgctgtgtgcacatacacaggtgtacgcatgtatgtaggcatgaacatgtgggtggacatgtgcatgcaagtgttttgtgtacaagcatatacgtgtggctgggcacatgtgtgtgcatgagtgttcatatggaagtatatgctgggcgaggcggctggatcacttgaggctagaagttggagaccagcctggccaacatggcaaagccctgtctctattaaaagtacaaaaattagccagacgtggtgatgcacgcctatatcccagctacatgggaggctgaagcacgagaatctcttgaacccagtaggcagaggttgcagtgagctgagatcgcaccgctgcattccagcctgggtgacagagcaaggctccgtcaaaaaaaaaaaaaaaaaaaaagcgcttgcacatatgttttttcatacctgtgtccttgtatgcatgtgcatgcatgtgagtgtgtatacaagcatatgactatgtgtacaagcatgtgtgtgcatagtgtgtccatgtgtgtgctgtgtttatatgagcatgggtgtgtcctatgttgtgttcacagaggtgtgttcatgtttgtatactgtatgcacagaagtgtgtgtattcacatgtgtttcctctgtgtacatgcaagcacatggaagtacatatgccagtgcacacacacattcatgcatgtgtgattaagacatgtatcttggccaggcactgtggctcacacctgtaatcctggcactttgggaggctgaggtgggcggatcacctgaggtcaggagttggagaccagcctgaccaacatggtgaaaccctgtctcaaccaaaaatacaaaaaattagctgggcgtggtggtgcacgcctgtaatcccaactacttgggaggctgaggcaggaaaatggcttgaacctggaggcagaggtgcagtgagccaagatcgtgccactgcactccagcctgggcaacaagagtgaaactcccatttcaaaaaaaaaaaaagaaaaagacatatatcttcggtttgggctcctgtattccttacctggattagaagtgcgtaaacctctgtccatcttccttggccctgtggagctgcctgggaacattccatgattaactctcgtggcgtcctgggacgaccaggtgagcgataccatgtggcacctgggaacctgacgtacctttagatttccgaccatctccctgctgtggtgtctgaggaactgtgcctgggctcaagggctgaacttttgaatacagagtaagaagttttagaaagataaactcctggggaaatgggatcttttaaatccatgtaatttttaaagcagtttttttgcggggggtgggggggggggtggtttgagataggttcttgccctgtggcccaggctgcggtgcagtagtgcagtcactgctcactgcagcctccacccgctgggctcaagtagtcctgccacctcagcctcccaagtagctgggactaaaggtgtgtgccactatgcccagctaatttatttatttatttatttatttatttatttatttactttgtagagttacctagttgtgtggcccaggctggtgtcaaattccttggctcaagcaatctgccctcctcagcctcccaaagtgctaggattgtaggcatgagccactgcagctggctttgttgttgttgttgttgttgttgttgttgttgttgttaagacggagttttgctctgttccccgggctggagtgcaatggcgcaatctcggcacactgcaatctccacctcccgagttcaagggattctcctgcctcagcctcccgagtagctgggattacaggcatgcgccaccatgcctggctaattttgtatttttagtagagacgggatttctccatgttggtcaggctggtctcgaactcccaacctcaggtgatctgcccaccttggcctctcaaagtactggaattacaggcgtgagccaccacgctcggccaagcacctggcctttttaagcagttttatccaggtgaaattgttgcataataggctgcacttactcagtgtgccaacagccatgagcccaccaccacgaccaatgccataaacacatccatcatctgaaaagtgtcctcaggcctcttggcatccctccccactccacatccccaagcagccaccgatcagctttctgtcttcataggtcaatttgcattttctagaatgttatatacatggaatcatacagtataggctctttttaaaacttaattaaggaaaagtcacaaaaggtaaaattcaccatctaaagtgtgtaatttggctgggtgtggtagcttaaacctgtaatcccagcactttgggaggctgatacaggcagaatgcttgagcccaggagtttgagaccagcctgggcaacatgatgaaacccagtctctactaaaaatacaaaaattaggcaggcgtggtggcatgtgcctgtagtcccagctgctcaggaggctgaggtgagaggtttgcttgagccaggggaggttgagactgcagtgagccacaattgcaccactggactccagcctgggcaacagaatgagatccagtctcaaaaataaaaatttggccaggcgcagtggctcatgcctgtaattccagcactttgggaggctgaggtgggcagatcacttgaagtcaggagttccagaccagcctggccaacatggcgaaactctgtctctaccaaaaatagaaaaattagctcggtgtggtggcggatgcctgtaatcccctgagattggaagggaggctgaggcaggagaatcgcttgaacccaggacgtgaaggttacagtgagccagggtcgcagcactgcaatggagtgcaagactgtgtctcaaaaaagaaaaaaaaattaagtgtgctagtcagtgcattcaccgtgttgtgcaacgaccagctctatctgattccagaacattttcatccccttaaaaggaaacgcggtccccatgagcagtcactccctattccccctcccggagtccctggcaaccaccaatctgcttcctgtctctatggatttgcctgttctggacatttcatatcaatggaatcatacaccatgtggcttttttgcgtctggcttctctcagcttcatgtttttggggttcatccatgttgtagcacggagcagtggttccttcctttttatggctgaatcatactccgttgtgtggatggaccacgttttgtgtatgcattcatctgccgatggacatggggttgtttccacctttcggctattgtgaatagagctgcagtggacattggtgtacaaggaattgagtcgctgctttctattcttttgggtctatacctgggagcagaattgctacgtctgtatgtagttatgtaatctcttttgtcaggcttcttcttttttttgagacggagtctcgctctttcacccaggctggagtgcagtggcgcgatctaggctcagtgcaagctccgcctcctggattcacaccattctcccgcctcagcctcctaagtagctgggactacatgcgcccccccaccacgcctggcgaatttttttttggttttgtatttttagtagagaaggggtttcaccgtgttagccggaatggtctcgatctcctgacctcatgatctgcccgcctcggcctcccaaaatgctgggattacaggcataagccaccgcactggccttgtcaggcttctttcactcagcccaacaattctgaattggtttcctatcactgtgagcatcaggaaccagccatcctgaactcgttggttccttctcattgttgaaccatattccatggtgtggtcagtgtgttcattcggtgggtggacatttgggttctcagtttgggactctcagaagttacacgtctctgtctcgacatctgcttcatttctcctgagtaactcctgagaggggaattgcagggtcacgtgctaggtatgtgttttaacattgaaagaaactgctgaagtgttttctaaagcagatgagggccaggcacagtggctcatgcctgtaatcccaggactttgggaggtcaaggcaggtggagttccagaccagcctgggcaacatggcaaaaccccctctctgcaaaaaaaaaaatacaaaaattagctgggcatggtggtacagtcagaggatcacttgagcccaggaggtcgaggctgcagtgagctgagatcatgccactgcattccagactgagtgacagagtgagaccctgtctcaaaaaataaaaaagcagatgagctgcctcgttcagatagtttgttgttgttgttgttgttgttgttgttgttgttgttgttggttttttttttttttttggagacggagtctcgctctgtcgcccaggctggagtgcagtggcatgatctcagctcactgcaagctccgccttccgggttcacgccattctcctgcctcagcctcccgagtagctgggactacaggcgcccgccactgcgcccagctaattttttgtatttttagtagagatggggtttcaccatggtctcgatctgacctcgtgatccgcccgcctctgcttcccaaaatgctgggattacaggcgtgagccaccacgcccggcctgttgttgctgtttttaagaaatagagtctctgccaggtgtggtggctcacgcttgtaaatcccagcactttgggaggccgaggcgggtggatcacttgaagtcaggagttcgagaccagcctagtcaacatggctgtctctactaaaacagagaaacactgtctctactaaaaacacaaaattagccgggcatggtggtgggcccctgtaatcccagctactcaggaggctgaggcagtagagttggttcagcccaacaggcggaggttgcagtgagccaagatcacagcactgtgctctagcctgggtgataaagcgagactccatttcaaaaaaattaaaaaaaaaaaaacagcatctcgccctgttgctcaagctgtatcttagatagtaaaaataaaaataaaaataaaaataaaccaggctctcaaagctttatctcatgacctggaggaacatacaaatgcactgacatatcaaggaaagaattaggttttacagctaaatggataagacaatccaaaatttattaaactatacagtatatatctatttccctgggagaaaacatgacagttacttactaacctgggggaaagttttaagagttaaatcttgtgtgtcccccagccttcttccctgtcgccactccctatccctgtgtgaactgttgcctcggcctcataagttatcgtttctttcagcctcagcccttctaacacttctgcaggaattctcagagcctctagtggccctgaccccactcagtcacagtgctgagtcatgcttctctttagggcagaggtcagcaaacctttgctttgaagggctggatagtaaatattttaggctttccaggctgtaatattacagtctgtgcctgaactatttcactctgctcttgtagcaaaagcagccacagacaataaggaaaggagtgtgggcaaggctgccttccagtaaaactttatttataaaaacaggtggtgggcctattgtaccatcctttattcttctactcacctcgtgaacgaactcctcttcatccttcagaaccccccccccccaccttttttttcttcacgatggagtctcactctgtcgcccaggccagaatgcagtggcatgattgcggctcgctacaaccttcacctcccagattcaagcgattctcctgcctcagcctcccaagtagctgggattacaggcacccaccaccgtgcccggctaatttttgtatttttagtacagacagggtttcaccatgttggtcaggctggtcttgaactcctgacctcaagcagtccacccgccttggcctcccaaagtgctcggattacaagcgtgagcgaccgcgcctggtcttagaacccctcttagatattcctactcccctaatgtcttctcttgtcctttaggataatcactcctgctgtgtgtcttttaactgctgcgctggattcacgtctacactcacgtctgtttgcataccagtctctcctgcctggctttgggcctcatcttcacaccctcagccattcttggttgactcatgccgcatttatggctcttgatccaagcccctaggtgggctggcaccagcatttctttttcttgcaaccttcagaagcaaatgcactttttaggaataaacttggccgggcacagtcactcatccctataatctcagcactctagggggcctaggcaggtggatcatttgagcccaggagtttgacaacaacctgggcaatatagtgaggcccccatctctacagaaaatacagaaacattagccagcatgcatcgtggtgtgcacctatagtcccagctacttgtgaggcagaggtgagaggatcacatgagcccagggagatcaagtctgcagtgagccgtgatcatgccaatgcaccccagcctgggaagtagagcaagaccctgacaaaaaaaaaaaaaagaagaagaaactgggcgaccctctctcttaggaaaaaaaaaaaaaagggctaggtgcagtggctcacacctgtaatcccagcactttgggaagccgaagtgggtggatcacaaggtcaagagattgagaccatcctggccaacatggtgaaaccccgtctctactaaaaatacaaaaattagttgggcatggtggtgggcgcctgtagtcccagctactcgggaggctgaggcaggagaatcacttgaacccgggaggcagaggttgcagtgagccgagatccgccactggactccagcatggtgatagagtgagactccatctcaagaaaaaaaaaaaaatgaagagggtgaattttggggagctaaacaatctatatacgtggacataacagagcagaatagttattggggactgcagaaggtgatggggggaggagggtgagggtgaacaaatttcccgttgggtacgatgttcactattcaggcaatgtgtatcccaaaagcccagattggcctggcgcagtggctcactcctgtaatcctagcactttgggaggccaaggcgggaggatcgtttgagcttaggagttcaaggccacctagccaacataatgagagcactttggaagcccgaagcgggtggatcacgaggtcaggagatagagaccatcctggctaacatggtgaaactccatctctactaaaaatacaaaaaaaaattagccaggcgcggtggcgggcgcctgttgtctcagctactcgagaggctgaggcaggagaatggcgtgaacccgggaggcggagcttgcagtgagccaagatagcgccactgcagtccggcctgggtgaaaaagcgagactgtcttaaaaaaaaaaaaaaaaaaaaggccgggtgcggtagctcatgtctgtaatcccagcactttgggaggccgaggaggatggatcacctgaggtcaggagttcgagaccagcctggccaacatagtgaaaccctgtctatgctaaaaatacaaaaaaaattagccgggcgtggtggcggggtgcctgtaatcccagctacttgggaggctgagacaggagaatcgcttgaacccaggaggtggaggttgcagtgagccgacatcatgccactgcactagagcctgggcaacaaagagcgaaactccatctcaaaaaaaaaaaagcccagacttcaccactacacgatatatgtgtataagaaacctgcacttgtaggccaggcgtggtggctcacccctctaatcccagcacttagggaagtcgaggttggcacatcacctgaggtcaggagtttgagaccagcctggccaacatggcaaaaccccatctctacttaaaaaaatacaaaaattagccgggtgtggtggcgcatgcctatagtcccagctactcaggaggctgaggcagaagaattgcttgaacccaggcagcagaggttgcagtgagccgagatcacaccactgcactctagcctgggcgacagcacgagactcttatctcaaaaacaaaaaaagaaaaagaaaagaaattggtattggcagactgctacttaccaccttcctggtgtgcttctggtgtcactagctcttccattcaagccctctctctggtagaggatcctttccagggagtcctatcgcattgagaatctcctgtggtcttggacagctagctcctcagtctttccttgttgcccgtgaccttggcagtcttgggaccaccagccatattcctgcaggatgcccccagcctgggcctgcctgatgttcttctccccagtagtctggagttgtggcttcagaagcaaccacactctaggccattcccgagtgcatttttcgtggctctcccggacttcatcttcctaggttgggtttcaaggaccctggagttttgggaatcccaaatttcaggacaggttcagtcttgctcatccccacatgcctctcgctgttactgctgtgtggccaaggcctgtggggccgagtcgtcttctgcttggggagctgctggggaggtttattcagagatgaggtcaggaaggatgtgggctgggaagggcatagcagaaagagggtcatggcttgttgggcttcaggattgagaggctgcctctggatggggtgggatgggggctgggatggagcaaactcaggggaagggtcaggtcttggggttgtctgatgatgtcacttgtaaaagccactgtatttttttttaagtgacagggtctctctctctcacccaggctggagcacagctggtataatcatggctcactgcagcctcgatctcctgggttcaagtgatcctcccatctcagcctcctgaggagctgggaccacaggcgagcaccactatgcctttattttttgtagagacggggtctcgctatgttgcccaggctggtctcaaactcctggcctcaagcgatcctcccaccttggcctcctaaagtgttgggattataagcatgagccactgcaggagcctgaggtcacattgaaggacagacagaccctcacgggatgtcgtgactggttgcctctggctttttgggcgagcctagtcgggtggggaactccagcatcgggtcaggtgctatctgcccaggagtgggactccacatgccccttaaacttcctcccaccattctgaccatgcctggctctgacctcccttctagctccaggacacgcgcgccccgagcctgggaggcatgctgaagccaggcggccggcaggatgagtgtgaaagaggcaggcagctcgggccgccgggagcaggcggcctaccacctgcacatctacccccagctgtccaccaccgagagccaggcctcgtgccgcgtgactgccaccaaggacagcaccacctcggacgtcatcaaggacgccattgccagcctgcggctggacggcaccaaatgttatgtgctggtggaggtcaaagagtcgggaggcgaggaatgggtgctggacgccaacgactcgcctgtgcaccgggtgctgctatggccccggcgggcacaggacgagcaccctcaggaggatggctactacttcctgctgcaggagcgcaacgcagatggaaccatcaagtacgtgcatatgcagctggtggcgcaggccacagccacccggcgcctagtggagcgtggcctcctgccacggcagcaggcggactttgatgacctgtgtaacctccccgagctaaccgagggcaacctcctgaagaacctcaagcaccgcttcctgcaacaaaagatctacacgtacgcggggagcatcctggtggccatcaacccctttaagttcctgcccatctacaaccccaagtacgtgaagatgtatgagaaccagcagctgggcaagctggagccacacgtcttcgcgctggccgacgtggcctactacaccatgctcaggaagcgcgtgaaccagtgcatcgtgatctcgggtgagagcggctccggcaagacccagagcaccaacttcctcatccactgcctcaccgccctcagccagaagggctacgccagcggcgtcgagaggaccatcctgggtgctggccctgtgctggaggtgagcggggaagctggtcggtctgtgggagggggcatttgtttggaaaatgcgggtttcaggccaagctcggtggcccacatctataatcccaatgctttggaaggctgagggaggaggattgcttgagcccaggagttcaagatcagcctgggcaacatagcaagatcttttctctacaaaaaaaaaaaaataattagccaggcaggcatagtagtgctcacctgtagtcccagctgctcaggaggctgaggcaggaggatcacttgagcccaggagttcgaggcttcagtgagctatgatcatgccactgcactccagcctggatgacagagagagactccatctcaaaaaaaaaaaaagaaagaaatttcaggctgggtgtggtggctcatgtctataaccccagtggtttttgagaggctgaggcaagaggatcgcttgagcccaggaattcaacatcagcctggtcaacacagcaaggccccctctctacaaaaaaaaaaaaaaaaagattaccgaagtgcggtggcacacatttgttgtcccagctattggagaggctaaggcgggaggatcgcttgagcccacgagttggagctatgattgcactactgcactccagcctgggcaacagagacagaccctgcctctaaagagagaaaaagtggaggttttctgattgttgttattattcaggtactgcgaagccaactggtcaggatgcaactgcctcttggaaagagagtttgttactcacagttcccgaaagaagaggatgcaatgccatggaaggccacagggggaagcactgggactcatcaggaggctgagggagagagggaaaaagggagcggggagaggcaggaaactttattgtgattttcatgcatcagaatgtgctaggcagagtaagctggcttaggattggcttgtttgaattatttcaatgggctctggggcataggggctgccccttgttgtcaggtgccagggcctggggtgatgagggcaggggatagtgggctggagtgtgagagtcccagagaggaggtggctggggtgtaggctctggactggttggtttgcatatggaaggcaagtcccaaaccatctctaggaactggctagaatcaatctaggaattgggaagggccgtctccctggggtcagccaggccccagatgtcagagcatcagaaatacagaaaataagtcactgggcgcggtggctcacacctgtaatcccaacactttgggaggctgaggcaggtggatcacgggaggtcaggactttgagaccagcctggccaacatgatgaaacctcgtttctactaaaaatataaaaattagccaggcatgatggtgtgtgcctgtaatcccagctactcgggaggctgaggcaggagaatcgcttgaacccggtaggtggaggttgcagtgagccaagatcgcttcactgcactccagcctgggtgacagagcgaaactccatctcaaaaaaaaaaaaaaaatagtcacagttaatacacatttggcttccagaacatggccattcattctcaaggtgcctgaaagaaaaggctggtgtattcaaaccagtttgaggagtgcttcacaacgggacatttctagggggaccagcagggtggaaggaagccagcaaggcgtacggcaggcctgggggttaaggggatggcgaagcattgtcggggagggggctgcctagtttcactgtagaggcagcagagaagggaccaacccaggctcttatgcctcatgccctctgcccactgttcattgccctgatcagccaaaccccacaggagccctcgatgtgccactgtgggtgagtcttgtggccacagggctacagaggtgaccacacagcacccatcattgcagggattgtaggacaaggtgcatccacatgtctcagaacaacgcaaccatcgccacctggtgagggccaggggcagcgtgtggcctcaggggtctgcacctctgggtgtgggatctgcctttttttcatttttattttattttttgtagagatgggggtctcactgtattccccaggctggtctcgaactcctggatgccaatgatcctcccaccttggcctcccaaaatgctgggattataggcgtgaaccactgtacccagctccgcttaaaaaaaaaacaaaaaaacagattggttgttttagagcagttttaggtttataaaaataccgagcagatagtgcagagagttcccatgtacccctcccacgcccaggttctcacattatttatattttgcattcgtgtggtgtgttggttgcacctgactcaactctacgttggtactgttactaacagccatagtttccattagggttcttggtgttgcacattctttgagtttggacaaaagtataatgaatgtgtctgccgttggagtgtcacagagtggtgtcactgccctaaaattcctccatgctccccctgttcatccctccatgacctttggcagccacagctcttctcactgcctccacagttctgtcttttccaggctgtctgtagttggagtcccagtgttgcaggcttttcagactggcttcttccacttcacaaccagcatttaaggttcctgcatgtcagttgggcacggtggcttacataatcccagtgcactgggaggccgaggcaggaggatcacttgagcccaggagttccagatcagcctgggcaacataacaagaccctgtctctaccaaaaaaaaaaaaaaaaaaaaaaaaaattagccaggtgtggtggtgtttgcctgtggtcccccctacgtgggagtctgaggcaggagaatcgcttgagcccgggaggttgaggctgcagtgagccaacgtctggccactgcactccagcctaggtgacagagcgagaccctgtcccccaaaaaaaggggagaggagattcctccatgtcttttcgtggcttgagagctcatttcttttgctgaattgtagctcattatatgaatgtgtcagtttcttcacacgtaggatcctgagagccccctcagtggagagagggagttgggggcagggtcagaccccaccctttctggagccttgacctctcgcctcttgttagtccccacaagctgagggctgccatgcaaattcactgaaatcacatctaagcagtgcctaggaatacatttcagttcctcttcctctctgaggtcatcagtaagacattaattggggtcatacaacttagccctggtccgacatatgtagcctattcctgttttctcctgtgcaagtaacacagagattcattgtcattgtttacatcagcttttaataaaactgctgagcaatttcaccatagaatgtccattttctttcctttcccatcccctcccctcccctcctctcccctcccctctcctcgcctctcctctattcctttcttgtcagggtctctctccgttacctagaatggagtgcagtggcacaatcataactcaccgcagcctcgagaacttctgggctcaagcgatcctcccacccaagtagctggaattccaggtgtgcaccaccatgcccggctaatttttaaattttctgtagagacacagtcttactatgttctccaggctggtctcgaactcctggcttccagtgatcctcccacctcagctgtttttaatatggcttgtcttgtgtgcattacattatatacccagaccgcccgttcattgctgtgtgagcatttgctgtgtggcaggctatgatataggtgctgggctatgtggtggccaaagtcaacacaaaattctccccaggtagaactcggggaagactctgggtgacacaggagctatagaggttctgagcagaggtagatgcaacccagctctggtctcccgaggccgccctggcgtcatcccagctctgagactcagccacagtgaaactgccagtggccccagtgtcctcccagcaggtggccagggggctcaacggctctccaggccaaaacatcagtgcctggcatccacacccgagataaaacagtgatcttgaaaattcagcatgtgtggcacacacctgtaatcccagagtcaggaggctgagtcctgagtcaggaggattgcgtgagcctaggaattccagaccagcctgggtaacattgcaagaccccatctctaccaaaaagtttaaaaactaggctgggtgcagtggctcatgcctgtaatcccaacactttgggaggccaaggcaggtggatcacctgaggtcaagagttcgagaccagcctggcaaacatggtgaaaccccgtctctactaaaaatacaaaaattagccaggtgtggtggcgagcgcctataatcccaggtacttcggaggctgaggcaggagaatggcttgaacttgggaggtggaggttgcagtgagccaatatcgcaccattgcactccagcctgggcaacaagagcgaaatctgtctcaaaattaaaaataaaaataaaaaattagccaggcatggcagtgcatgcctgtggtctcagctctcaggagcttgaagtgggaggattgcttgagcccagaagttcaagactgcagtgagctgtgatcacacactgcactccagcctgggtgacagagcaagaccctgtctcaaaaaaataacaaaaaaaatttagtaggtgaatgaatgagagggtagatccaacatttaccatgtcagacattttgccaaatgggactaggcaggtgggtaaatgcctgagccccgcagaaatgacacgcccagccccagggtctcaaagtggcacggccaggaggcaggattgccacctaggtctcagttcagggtccatgtcctccccaccacgttgctgcctccacagcgccatctcactaggaccctccagggcgtggacaagtttcctgttgctaagtgttaggggcaagggagtctccaacaacagggattaaggctctcatggtcctggaggccagaagtctgaaatcaaggtgtccacggggccgcactccctcccggctctgggggaggatgcttcaggcctcttcagcttctctggtggctgcagatgtgccctggcctgtggccacgtcacatcagtctctgcctctgtcgtcaggggcgttcttcctgtgtgtccatgtcttcacgtggctttcttataacaaggacaccactcatgggatgtagggcccatcctaccccggcatgacctcatcctacctaattgcatttgcaaagaccctatttccaaataaggtcacatacacagtttctgggggtgaggatgtggatataattttgggggcggggggctcaagtcagcccacagcatcccccatacagccccacctggtctgcttcaagtcctacctggcccctggcaagtcccacttggtgacatcttgtgcctgggtccttgagggctgccccagatccgcgattgtcctggggaccggtagttcctccccggatgccagcaaagctccctccagcctccacgcctgcacagtctccagtatgccttcaacagccattagtcaccctctgtgagtcagacccccggtcctgccaggccaacctgcttggggcctcagcagcgggggctggcgaggccagttttctccagcggttctaagccgctcgagggtggtgcccacgccggcttccaaaacaggcttgagccaaatccacgtcatggcaataaacgtgcttcctggggcgactgtttgcaaagggatgtgattgtcttcactgagagctggatttctcaacctggctctgctgacattcagggccggatcgttctctggggagggagtcatcctgtgcattgaaggacattgagcagcatccctggcctccacccaccagatgccaggagcactccccaccccgcaggtgtgacacccagaagtgtccccagacatttcattgattagagaggtattaacaaaatagcttcccgttgtcccctggggacaaatcaccccctgggaatagaacagctgtctttgagttcttcccataagacccaatcactgttcattgcagccactgagcttttagaaattatctgtgagttctttctgttctgtgctaacttaagagtcattttctttttttctttttttgagatagagtcttgctctatcgcccaggctggagtgcagtggcacgatctcggctcactggaacctctgcctcctgggtttgattctcctgcctcagccctcccgagtagctgggactacaggcgcccaccaccgtgcccggctaatgtttgtatttttagtagagacgggtttcaccatagtggccaggctggtctcaaactcctgacctcaagtaatctgccctcctcagcctcccaaagtgctgggattataggcgtgagccaccatgcctggccccaagaatcttttttttaattttatttatttatttatttatttatttatttatttatttatttatttattttgaaacagagtttctctctgtctccgggctggagtgcagtggcgcgatctcggctcactgcaagttctgcctcccgggttcgtgccattctcctgcctcagcctcctgagtagctgggactacaggtgctcaccaccacacccagctaattttttgtatttttagtagagatggggtttcaccgtgttagccagaatggtctcgatctcctgacctcgtggtccgcccacctcagcctcccaaagtgctgggattacaagcatgagccactgcgcccggccatcattttctaataagaggaataagacctcaggcccactgggtatcagggtttgggcttcgtgattttcctccatcatctctaatccctcacggcagctctgcccattttaaagatgaggaaactgagccccagagagacacgtggatgtgtgagtttcctgaggtgtctataacaaagtattacgggctgggagccctcaaacagcaggggttgattctctcacagttctggaggccagaagttgaaaatcaaggtgtgggcagggctgggtccctctggaggctctgagggagaatctgtcccaggcctctctcccgggttctggtggcttcagccatccttggagctctgggcttgtggccgcatcactctgccctctccctccgtcgtcacctggtcttctcccctgtgtgtgtccaatctcccttgcctttctctcatgggatcacctcatctcaaaatacttaccttcatgacatctgccaagaccccgtttccagataaagccacagtcacaggttctgggggtaaggacttagacatgtcttttttgggaagccacaagtcaacccactgcaggtagattccccaggccacaccgcagagagccaaagcctaacccggggtttgaacccggcctgagccccagccccccgttcaggctgcctctctgctctcccctctctcgcccgggctgcagaaagccggagatcagcacaactcgctgcatcgattggggattttttctcagctccccgaaaggagaagttgagctgttttgaggtttgagtgtcgctggatgcaccccctgacccccgccccccgcgagggttgcagcctcgctgtgtaatgctgaccaaaaaacaggaagggagcactgtggaaagccggttccaatcagctgatctgcccgccactgcagttaactgttgccatcacctttcaccaagtctaggggctgcagaagccatgagtctccccatcttccacatggcctctagcctcccagtgcaggcgcccgtcgacagcccaggggctgtggatagagcaccttacagcatcggccatggggtctcgccgcaaagcacacccagaacacgctcctctccctttgcccacagcctcagatccaccaggcactcgcctcggtgcccttctgagagcaggctgagtccagggggccaaaggctggggttcccttcatctgtcctgaactgtagcaagtgcagctggcagctggcagcgtgcatggggttttcattctgaaagcagaaataaaataaggatccttgcttgtcaggctgttgtcccaagggtccctggactccatggagcccctgtggcccggcccacagtgggacacggtgacagtgatgggctgcagggcgcagagggacgcccccagctggtggagccaagctcacccgaagttgtgccgatgcccaggacattccagtgagggactgaggaagggtcctgaacgtgccactgccccagacccccctcttggggcaaaggaacctaggactcgtacccacctggaccgggtcctgagctcctccttaggggccctacaaacccagtctcatgtttcccccaactcccccagcccctctgccatcagccaggccactagctctgttcccccacccacagtcagcactggggtaggtcacctagaccacagtgccattatccacttcgacctctgccctcaaggacacctgcctgggccacgtcctttccccctgagtctgtcgggcaagacacagttggatgccagcctccacccagcattgggggcgtcatctcatacgtcctcaccacatcctgatgtgggcagactgaccacccccacctgacatgtgaggaaactgaggcacacgagctgctcagcaagggtggcagagatagaagtttctggaaccaggtgtgtgtcaactctcatgcctctgaagttgaggttcctgtttaagagcttatggagatataatttacctatttacttatttataaatagataccttatatttatatctacagtttataaatatatagattaaattgtatctgcattttataaatgtataaattatatctgcagtttataaatctgtaaattaaattatatctgcagcctcaaattcctggcctcaagtgatcctcccacctcagcctctcaagcagctgagaatacaggtgcacaccaccacccctggctaatttttttattttttgtagagacagggttttgttatgtcaccaaggctggtctccaactcctggcctcaggcaaaagtgtgcaattcagtggcatttagtacactcgcagtggtatgcaaccgtcgcctctatgcagttccagaacatttccatccccctgaaaggagaccccgtccccatcagcattcactccccacttccctctcccaggccctggcagccactaacctgcttcctgtctctatggatctgcctgttctggacatttcagatcaatggaatctctcacactctgtggccttttgtgtctggcttctctcacttggtatcatgttcttgagattcatacacgtcgtagcatggatcagtgcttccttccttttcatggctgcatcatattccacggtatggatggaggatggaccataatttgtttctctgcccaccagttgtatcagcatttcattcctttgtatggctggtatgtggttggggttttcctggacccctgccccagccaggccaacctcccccatcagtgtcccccacaagaacaatgttggggagtggggggattgacactcacacagaggatcccctggagactgtcatgagccctgggaaggaggagagcagtcctctccagcaggctgcttcgggcgtgctaatggctggagccaccgagggacaccaggtgggaccaggagccggggtgggaggaagcaagaagggggcaggcgtgcccaggtatagcagggacgtccaggtacagcagggacatccatctgcacgttcttcccagcctgctgagaagccagtggccagagggaggctggcttcagggagcagggcggacgggccggctggcgggggccctggactcgggcaggagcgtttgcacgtggcttcccaagtgcgacagagagggagtcctgggagcaaccccagccgcggggatgtgccagatctgaggctgatagctgaggacggacaggtcccaagggaggaggagagggggtcagagatggctgcaggggaactgcccggaggccagtcctggtgaatttggtttggggtgcttcgttcaagcagctgatggggcatccaagggagaattgtgcaccagccacacaaagaatcccgcagccccagggctcatcaggcctcagaggccatcctgtcgcatgacccagtcagagaggggtcagggacagacagcaagctggggcacctcccagccaggcactcacccagcccttggctgttggccatacagggaggtgagtttgtcaggagaggtaagtgttgagagggggcgtgtggctcccctctcattggggggcatttcagggatgagattcagggcataggccacagaccggaggaggctcagggtcaggacggggccaaggcctcagaaggcagaagtcacccatgtcacgaggagcaaagggaagccagcatttgtttgaggaagagcaatacctgcagtcagcacccgtctgtctgtcaaagggtccaggagcccccactggcttgagttgtgtctatgttacatgaatgcagaggtatttgaggctgagggtctctgagaccacttgtcactttgctgggctgagggagaaggaaggtggggcgtcagtgggcagcagggtgggcagcaagcttgggctcaggagggtccggggcagcagcctggtgcacttcaaagggagattggaaggccagcgtgtccagggccgggttggggaagcagggccagggtcattgggtgcccgtcctcctctcgggtaggcgcactgctgtggtggggaaagaggaggcagaattagggctctcaggagtttcccccctgctcgccctgcgagcggtcaagactcaggctagcccaggccatccgaaaggctaaacagcgggatggttatccacacaaacatctaggtcacccatccacacaggcaggcgtgtgtggaagacagggtggtgcaaggacagaaggaggaggtacaatgtggccctgaccgcaagctactgaaggtccctgaggggggtgagctgggcaccccgggcaccacaggaagcgaagatagaatcaatctctggctgcctctcctgtgtggcctccccgggatgtttgcacaaaggtagggggaagcagtttttgggggccctgggtctgcagagcagcccagaggaggagataggagctggggcccgaatgcagggcaggcaggagacggggcagggcaaaccccagaggcgacgagaaagcagaataagccatcatatagggtcagttttagacctcacagtcagaaacccttggggacagaggccaggcttcctggtccaacccaagttcccaacccctgccctgttgatatgtgggctggatcattccgttatggccaggccatcctgtgcatcatgggggactgagcagcatcctgatccctgcccactagttgcccatagcacccccgcccctagtcccgacaaccagaaacgtctccagatgttgacaggtgttccctgaggagcagaaccaccccccagttgagaactgctgttttaggccaactgtatgacaagatagatttcattgtaacagatggtctctgcctaaatatttgtagattctttttttcttggtaacattgtgccattggagttacacatcaacccgaccaaattcggcacgattgtggagtggctgttgggcgtggcgggaagcagtttcagtccggcgttctccctcgtcccttgggggaggtgactggtgtgcctcctcacctctcactcattgcccacccagagcccaggggacggtcactgctcacccacgatcaggcatgtcctcgtgtcaccgatgatgaagcggccctaggtgcgtgaggatctggctttccaagagcctgctcttccaggtgcactgagtgacgtcttacaatgttgtttgtaagacttgctccccatgccaaaaaccgcagtccctgattttaggacttccgcctgcactgagaagtaacatgctccctgctggggttttttgcaaaggaatgtaatcaaagaggtttgccggttttctgatccaggagagtgctggtttgtgcgccctggattctgtggtcctccctgtcctcctggggtgacttcttgaaacctatgccaggtgctggctgtggctcaggtctcgctcctttaagcatctccccagcaggaaacaagtcaagaaccactgccgggaaacaggatcagcggccagagattccccactttggcagaaccatgacacgtttcattatctcttttggttcccccagttgcttttccccttttttttttttttttttaataaaacacttcgtctttttagtgtcttttcatttttcttaactttaaaaaaaattttttttagagacagggtctagccctgtcgcccaagctgaggtgcagtggtccagtcatagttcactgcagcctcaacctcctaggctcaagtgagcctcctgcctcagcctccaaattagctgggactacagccacgtgccaccacgccagcaaggtttcatttcctttggtatctaccaggggttggcaaactacagcccatgagttaaatctgccagtgcctatctctacaaataaagttttattggtgcataaccatgcccatgcatttacatatcatccctggcatctttggcaccatgagtgcagagccgagtaattgcacccgagacactgcatggcccacaaagctgaaaatatttactacctggccctttataggaattttttttcctttgtctaccccagtacatccaccgcttcgtagaatgttccagaaccccataaaggtgaccatttcacagatgcctttttttttttttttttgaaatggagtcttgcttggtcgcccaggctggagttcagtggtgcgatctcagttcactgcaacctccgcctcccgggttcaagcaattctcctgcttcagcctcccgagtagttggtattacaggcgcccaccacaacacctggctaatttttgtatttttagtagaaatggggattcaccatgttggcctggctggtctcaaactcctgacctcaagtgatccacccacctcgtcccccacaaagtgctgggattacaggtgtgagccactgcacccggcccccaggtgtcttcttatcttctgctcagctcccccttcccaaatgtaatgaaagcagctttccatcctagatccagacagcccagatcaccagctggaatctctgcatttgtatccgtgccatagacatacatacgtattcataaacatccatttccccacacagagtcataaagcagtttggggagtcaggaaaggaggacacagatagagatgtcccacagggttcggcggagctaactcactctgtctctctgccccacagctgggagtggtagtacagcccatgcatttgggacctggctaggctggcaggagctgtgcggggttccctccttgccttgaaccccctcacagggctgaacatcagcaggccccatctcttgaagggtttccagctgcctcctgggctctgagatcgcgtgcatcctgcctgcagggcgcacagtctgccagggactcagtgggaagaggatcatggaacctgtgggcccagagtcaccgagcaggaccctgtcatcctcctggtctctcacaccagcccccttcctcactgtagctgacagggcctgaccagaggtgcatgcccaaggccgcaaaccccctaggaggaagctggcatctggggtgtcagaagtgtgactaggagctcagagggtgtactggagcttgcagttgggggataattaagccagagggccacctcttttaagggagagtgaattatggcatgaggacaggcatcccggagtcaggcggctgggaacaaggcagtggtcattgtgacccggcagcattcccagccctggtgccttttccccagctctggagacaaaccagcaggcctgggtgttccccccacagagcacagagagcagcaggcgctgtgaggggcagcctgggtgggaaagagggaatggagggaggggtgcagaccgcagagaggccgctccaagctgaaaaatggggcacatcagccaaagttgtctttggtgggtatggagaggatgggggtgccctacagctgagtgctgaggctggaggctgcattgacccccaggtagaaggggcaccccaccgccacccccaaatccccaggtactccctcggcttcatttctgtgccctgccacataaaacaacacagccctgacgtttggaatgatctaaggctattttagacaaaaggggaagttatattttggggaatgctgcatctaagagaagagtgaaattatggggtatattttaagcaccataaaaaggtctccttggaatttggagaaagttgattaaaagctgaagtgtaaggtctgggacacccctgccacagccctgccctccccaaatgttctgggggttttactgctccagggttatggagacaggggacccatctgtctatcggcgatgtcagcctcaatgtttggggcgggagtgtgggcaggcatcaatcagccacagggcctggctgccaatttgtttcctagtgattatccaggatagatccgatttctgcaggcctcgccctgggcagctcagtccccaatgtcacagtgcagttgccacctaaggtttccttctgtgtgacttggccacagcaagccagaaccagctcctgaaaccagtcccctcgagaaccccattcccgggagtgcccagaggcagcttggcatcttctgcccagctgctgactggccctgtgaccccgacacgtggttcctcctggtaaaagaaagaaagggatgacttagcagtggtcaggcaccagcacccaacaccttccctagagggggttctctgtaaatcccggacagtatcatcacctctttaagggagagtgaattacggccacctctgtctttgtcagtgtcattacagtattctcagcccgatgcggtggctcacgcctgtaagcccagcacttttagaggccgaggcaggctgatcacttgaggtcaggagttggagaccagcctggccaacatggtgaaaccccatctctactaaaaatacaaaaattagccaagcgtggtggcaggcgcctgtaatcccagctactgaggaagctgaggcaggagaatggcttgaacccgggagtcagaagttgcagtgagccaagatcatgccactgcactccagcctgggtgacagagcgacactcttcctcaaaaaaaaaaaaaaaaaaaagaaaagacatatacaggattctagttagcgggtatgtgaactgaggttcttgcctggagctgattctgccatcggttgatgtttggcaactgctggagacatttttggttatcatagctggggagggagagatgctactggcttctggtgggtagaggccaagatgctgctaaacaccccacagtgtacaggacggcccccctctttaaagaatgacccggctgcaaatgtcagtagtgctgaggcagagagacctgctttagtttagaggcctttagagagtacaattgaaaatctggtctggcgctctggacagaatctgcagggagcagtggtaattcagaagccaccacctagatggaggccgggagccatggctcacgcctgtaatcccggcactttggcaggctgaggcaggaggatagcttgagcataggagttcgagaccagcatgacaacatagcgagagcctgtctctatattttttaaaattttttaaaatgaatttatttatttatttatttatttatttttatttttttgagacagagtttcactctgtcacccaggctggagtgtagtggtgcgatcttggctcactaaaacctccgcctcccaggttcaagtgattctcctgcctcagcctcccaaatagctgggactacaggcgtgcgccatcacgcccacctgatttttgtattttttggtagagacatggtttcgccatgttggccaggctggtcttaaactcctgacctcaggtgatccgcccaccttggcctcctgtgatcacgcctgggatcacaggcgtgagccaccatgccgggcctgtttttttaatttaaattttcttttaaatgaagccaccacctgtgtggagggagctgtttgtggaaggtgtaattgttaataagattgtcctccaaggaggatgagaagacgacaagggcaggcagcccctggagaggccctcagtgcaggccggcctgaggggacatctccagtcctgccaaagtgcctggacccgttctcggcacctctcacctctcccctacaaaccagaatttaccagctccaggagttcagaggaatggccaggaagcaagatgtgggggtttgagtgcaggcttggctgcctgcatgctgtgtgacctgcagcaagtcacttgacctctctgttctgcctcctgatctctcacgccccagggcctttgcatgtgctgtgccctcaatctggaatactcttgccaccatcatccttttaagtcccacccaaaggcctccatgtcccttcagtgccagcgcacagcaccactgggagattcagagcacagatccaggatgacgggcaagcatggggtgtggctcccactgccttgcaccctgaggctctgagcaggctctcttcagcgaccctgtgtttcttacagccggcttctggtgttggctgaggaagagccaggaatgagcgagtgctgagatggagtcacaggacactgaggcagcagggaggccgaggaggggagcctgggcggtcctcctatgcctgagtgcgctcccatccttactctggaactgccacgtaaagaaaagcagagatgccccgtggttcatacctgtaatcccagcacttcaggaggccgaggcaggaggatcatttgagctcaggagttttttgtttgtttgtttgttttgttttgtttttgttttttgacacagagtctcgttctgtcacccaggctggagtgcagtggcgcaatctcagctcactgcaggctccgcctcccgggttcatgccattcttctgcctcagcctcccaagtatctgggactacaggcaccaccaccatggccggctaattttttaattttagtagagatggggtttcaccatgttagtcaggatggtctcgatctcctaacctcatgatccacctgcctcggcctcccaaagtgcagggattacagctataagccattgcgcccggccaagctcgggagtttgaggtcatcctggacaacgtggcaaaaccccgttgctacgaaaaatacaaaaattagccaggcgtgctggcgcatgcctgtagtcccagctactcaggaggctgaggtgggaggattgcaggcccatgatatgtcaaaggcaggatgtgtaaaccaagatggaggtgatgaggagcagcttgtgcccaactgtcaggagcagcaagggtctttgtatcatatgatccctctgggctcagggcagtgcctgctgtggcttccccagacccaaggaggatgccacacagtataccattcagcgttggagtgagcgcccaagacaggctgggcagccaccgctactgccccttttcagagcagattggattcaaaggagattatttagccataaaaaggaatgaagggccattcaggctcacatctgtaatcccagtgctttgggaagccaaggcgggaagattgcttgaggccaggagtttgaaaccaccctgggcaacatagtgagaccccatctctacaaaaaataaaaatattagccaggcatgtgcctgtaaccccagctactcaggaggctgaggcaggaggatcgtttgagcctaggaggcagaggttatagttggtgagccatgatcatgccattgcattccagcctcggcaacagagcaagactctgtctcaaaaaaaaaaaaaaaaaaaaaaaagatagatagatagatatctaaatgtatatctcctttatgctaattggtaacagtcctcatggtgagtattgaataaactggctggagtgggtttgtggcggcagctcttggagtatatgttctggagagagagagagagatatataacagcagatatagagcagtttagtcctgacatggtggcacatgcctgtagttgcagataactcagaagactgaagcaggaggattgcaaagccctgggatttacaggcatgagccctcatacccggtctggggtttcttgttgttgtttttcaagacagagtctggctctatcgcccaggctggagtgcaatggtgtgatctcaactcactgcaacctccacctcccggactcaagcgatcctcccaccttagcctcccaagtagctgggactacaggcgtgcaccaccacacccagctaatttttgtatttttagtagagatggggttttgccatgttgtccagcctggtctcgaactcctggactcaagccatccacccatcttggcctcccaaaaggctgggattccagacgtcagccacggcgcctggcctgttgtttttaacacacccgcttacttgtacttggattgtcaactttttctcttcctcaccacagcccactgaagggacacagcagtggtcccacactggggttcgggagatgagggcaaactgaaatcttggtgattcagactttctttccccactaccataagtgagggaacccacacttacagcagatatgtattccaaatatatatatatatatatatccaagagctgccgccacaggatgacgggttgctgaccacagctctggagagtgggtccaaggggagcctgggggccccaaaaggcatcccccaccccaagtttacagagagaggcagtggcacctgcagggagggcagagaggtgctgtggtagctacagaccctccttccagccctccctaaggagattacctttctttacatgtgcaaatgttcacttttgccgcattaaaagtactggaagggcgcggtggctcacgccgataattccagcactatgggaggctgaggcggttggattgcttgaggtcaggagtttgagaccagcctgggaaacatggtaaaaccccatctctactaaaaatatgacaattggcccggcacagtgctgcgtgcctgtagttccagctactctggaggctgagccaggagaatcatttgagcccgggagttggaggttgtgttgagccaggatcgtgccactgcactccagcctgggcgacaggaatgcaaccctgtctcaaaaaaaaaaaaaagtactggaagtctttgctgttcaagtccctgtggtttggagattgtgtggggaagcaaacgtcatctcaagatgaaacctttccaaatgagctgaacacttgcagaatgagcctccactcagactcccctctcagcttagcctaaggctggctcctcccatgatgcaaatacggtgcaagctggttgcaaagtgaggttgagaatctttcttgcaaaagatgcattatttcaggaagccatcaaaagttgcctggaggctaggcgcagtggctcaggcctgtaatcccagcactttgggagtaagaggggggcagatcacctgaggtcaggagttcgagaccagcctggttaacatggtgaaacctcgtctctactaaaaatacaaaaattagctgggtgtggtggcatgcacctgtaatcccagctactcaggaggctgaggcaggagaattgcttgaacccgggagattgcacctctgcactccagcctgggcaacagagtgagactctgcctcaaaaaaacaggtgatctggagaatcactcccctcatacctccttaagtctacatggaacagtctcaaaaatcattcctacatcacagccaggtgtggtggcacatgcttgtaatccaagatgctcaggaggctgagacgggacgatcacttgagcccaggagtttgggacatagacacagacagccaatgacaggcaggtatcagttagcaggcaggaaagaggttcaaccatggtggacagagccttaggagctaatgaggccatgatgctggtaactttaaatgacatcattcagggccagttgcagtggctcatgcctgtaatcccaacactttgggaggccaaggcaggaagctcacttgaagccaggagttcaagaccagcctatacaacaaagcaaaaccctgtctctacaataattaaaaaattaaacaggcgtggtggtgcaaggtggtgctactcaagaggttgaggtgggagggccgcaggacccaggaattggaggctgaagtgagctacgatcacaccactgctctccagcctgggggacagagcaagatcctgtctcagtaaataaataataaataagtaaataaaatgaaaggattttcagcttggcttgcaagtatataaagcaagttctgttccttgctttatacacaagacacacctaaatcaaagggcttcaggaagttaaaaacaaaggggaaagcaagcacaggtgtaccaggcagtgagaaacgggagatagcagagctgcaattcggacatagttcaggcctctgcacattacatgtggcaaagattggttatgatgccaaaagcctcactttgcaataaaggtataacacttgtgaatatctatgcaccaaacaacatagccactgcctttatacagtagaaatttgtgtgtgtgtgtgtgtgtgtgtgtgtgtgtgtgtgatggagtttcactcttgtcacccaggctggagtgcggtggcatgatctcagctcactgcaacctccacctccctggttcaggcgattctcctgcctcaacctctgaaatagctgggattacaggcgcacgccatcacacctggctaatttttgtatttttagtagagacgggtcttgaactcaggtgatccgtctgtcacagcctcccaaagtactgggattacaggcatgagccaccacacctggccacaaagtaaaaattctaaaagatacaaggagaaacacacacacagcttggttgagtagatagaaaataggcaaggatgttaagacgcccaaaccacatgcttaaggcagacattgtggccatatcgtgaactcttaagagaataaacctccttacacatacatggaacattctcaaaaaatcatttttcttttttgagacagggtctcactttgtcacccaggctggagttcagtggtgcagtcttggcttactgcagcctcaatctcgtgggctcaagtgatcctcccacctcagcctcccaagcagctaggattacaggcacttaccaccatcaagtctggctaatttttgtattgtttgtagagacggggtctcactatgttgcccagggtggtctccaacttgtggcctcaagcaatccttccaccttggcctcccaaagtgctaggattactggtgtgagccaccacacctggactcaaaaatcatttctatatcagagtcaggtgtggtggtacacacttgtaatcccagctgttgaggaggctgaggtaggaggatcacttgagcccaagagttcaggaccagcctgggcaacatagcaagaccccatctctacaaataaaaatcattcctatgtcaggtaaagagaaagcatttagaacttcccagagtagaacaattacaagtgacactctaacaatgcaataaaacttcgtggaacttttttttaaagtaaacttatattgagcaactcttagatgaagagatacaaacacagctgggcgtgggggctcatgcctgtaatcccagcactttgggaggccaaggcgggcagatcacctgaggtcaggagttcgagctcagcctggccaacatggcaaaaccccgtctctactaaaaatacaaaaattagccgggcacctgtaatcccagctactcaggaggctgaggcaagagaattgctcaaatctgggaggcagaggttgcagtgagccgagatcgcgccactgcactccagcctgggcaacagagtgagactctgtctcaaaaaaaaaaaaaaaaaaaggtacaaacagaccaaaattgcaggttttctaaaaatcagtgacaaacacccgtatgttatcagaatccatgggctatatttaaagtgatggtaggaggacaccacatagctgaacacccattagatccacaaataggaaagaacggaagtaaatgaattcatgtcctatctcaagctgagaaaaaagaacaaagtaacccccaaagagaatgatttgggcatcaaatgggcaagatgaggccagctgcggtggctcacacctgtaatcccagcactttgggagaccaaggtgggcagatcagttgagcttaggagttcgagaccagcctgggcaacataatgaaaccccatctctaccaaaaatacaaaaacttagccgggcgtggtggcacatgcctgtggtcccagctacttggagggctgagggtggagaatcacttgagcctggaaggcagaggttgcagtgagccaagatcatgccactgcacactagcctgggcaacagagtaaaaccccatccccccccccccaaaaaaagggtaagatgagccctaggggaaatatgataaattcttcagatgttttcacagccttgagaaccaaacaggaccttcccccatcaaagcctggtttgttctgtattctttctgtgacctagtacgtggtttcgtgataacctaaacccaaatttagtgacatatgtaagatttcagtaacttgtttcacacttaggtttttgttgttatttaaggcttcccctaccccacccctgtagggtttgctgtgagactttagctcatggtaggagtctgtccttaaagggccacgtcctagccctgggagtccttgctgcgtttcagtgtttgctgtaatgccatctgcgtctgtggctgacagttggtgtctcttgtgaactgggacatacggcgttgggagcactcagctctctgtacatccctgccgtccgtccatctgaccagcaaccagctatcgagagcctgccggggtgccccaaaccccttgagcaaccagaaaagaacagaacccggcagcagctaggctaggggccctggagagcctccacttcctcctctgcgaataggggagccatgaggttggggtgactcttccacttcctgcccccacatccgcaggccaactgagcctgcagctgcctcctgtgcaggcttgggcttgggggtgtggggagtcctgtcttgcaccacatagctgcctcctcacctccatgacacccacccccttcgcagggtcttccttgtgcctggctggcatcatccccgacatggcccccactaacctcctcattccctcggccccgccttcaccacagctctgagctctgttgaaagcatcagctaaacttctcatttcctcgcctccagccctgcctgctggcctccgccccctctgctcccagctcccagggagtctcttctcacccagccctccttgggcacgtgaccctgtggacccattttgtcctgggtgcttcccaggcctgctcctccacgtccccaccatggcctcgggagaccagtcacccagggtgacactcacctcctgccgacccatcctgctggaaccatgtcggggatccccggaaaaccccatttaacagaggatccagaacagcggcccctggccactcttttctcacgaaaaccagacagtctgtatttcacacagatcctaggggccacccagtctctgtcagaatggcttgactctgctattgtaactcaaatgcagccttaagccagacccagaccgatgtggctgtgtgccaggaaaacgtcatttgctgctgctgaaaattgaatttcacatcaatttcagccatcaagagatcttttgacttttttttttctttttttttttttttgagacggagtctcgccctgttgcccaggctggaatgcagtggtgcgatctcagctcactgcagcctcctcctcccgggttcaagcgatttcctgcctcagcctcccaagtagctgggactacaggcgcccaccaccatgcccggctaatttttgtgcttttaatagagacggggtttcaccatattggccaggctggtctcgaactcctgaccttgtgatccacccccacccccacccccaccccccacccccggccttccaaagtgctggaattacaggcatgagccaccacacccacccgatcttttgacattttttctcccctaagcattttttttttttttttcagatggagtctcactctgtcgcccaggctggagtgcagtggcacaatcttggatcactgcaacctttgcctcccaggttcaagcgattctcctgccacagcctcccaagtaactgggactacaggtgcacaccaccacgcccggctaatttcatttgtagtttggtagagatggggtttcaccatgttggccaggctggtctcaaacttgtgacccacccccctcggccttccaaagtgctggaattacaggcatgatccaccatgcccggccaattttttgactttttttctcccctaagcattttttttttccagttggaatcttgccctgtcgcccaggctggagtgcagtggcgcaatcttggctcactgcaaccttcgcctcccaggttcaagcgattctcctgcctcagcctcccgagtagctaggactacaggtgcccaccaccacacccggctaatttcttttgtattttggtagagacggagtttcaccatgttggccaggctggtcatgaactcctgacctcaagtgatccgccctccttggcctcccaaaatgctgggattatatgtgtgagccaccatacccagccccctaagcatttttaaaatgtgaaaactgtccctagaacgtaggctgtacagtaataggtggctggccacactttgcagacccccggtagagatcactggtaccaggagggtgtcctccatgtggccacacccatgcccctacctgtttgtctgtgaccgctttcctgccacattggcagagctgagcggtgacagcagatggagccaaaaatattcaccacctgccccttcgcagaacaagtttactggcccctgattcacacagaaaatcccgcttaatcctccatctgctaaggcagagatttttccaaaaccttaccttacaggagagaaatctgaaatccaagagccgtgaactaatttgcccaaattgcccagcagtagccttgaacctccaaccctccccctggccaccaggatccactgaatcttgcaaagtgtctcagcagaagtagcctgcaacctggctagtcatggtggctcaagcctgtaatcccagctttttgggaggccgaggcaggagaatcacttgagcccaggagttcaaggccaccctgggcaacatagcaagaccctatctatactgaaaaaaaaaaatttttttttttaaatttagcaaggcacagtggtatgcgccggtggtcccagctacttgagagtctgaggcgggaggatcgcttaagcccaggagtttgaggctgcagtgagctaggatcacaccactgtactctagcctgggtgacaaagcaagaccttgtctcactaaaagaaatagcctgcagccccatgaggacctgggggtttatttccctggcatttccgtgaagcacagccccagctcccagtggctgccccatggctgtttgcttggcagacctggcagagcagaaccccccggtccctcaggcgtcctgggacagggcactgcccatagggctcctgtgtccatgagggcctggcacagccttgggatgtggcctccgcctaccggcttgagccaccggcgctcagggtcacagctctcgtctgggtctgactgctgtcagtgtccccaggtgggcgtcacctactccgtggcctcgggacgagtgctgtttcaggtagaaagttctgctaggaacttggagaatacaggaaagaaataacaggaggtccaagctggctgccaggccctggccagtgtcatgtggtggtctccaccttacccagctagaaggagagaggacttttgcaaaccaaaaagcaaggggacaatctccctctttcagcccctttctttaggctctgtggtggctcgatatttgcagatgttctttctccagccgcagcctctcttggccataccggtcactccttcatctcagtgcctgcatggccttgacgggacaggggagatcagaagttctgcgtggctcatggcctgagcaggggggtggaggcttcacccagaggtggtgttgcagagggaggaagaaacagcatcaagggaccgggcatggtggctcacacctgcgatcccagcacttttgggaggctgaggcaggtggattgcctgagctcaggagttcgagaccagcctggccaacgaggtgaaaccctgtctctactacaaatacaataaaattagctgggcttggtggcgggctcctgtagttgcagctactctggaggctgagacaggagaatcactcgagcccgggaggtggaggctgcagtgagccaagatcgtgccactgcactccagcttgggcgacagagcgagacagtttcaacaacaacaacaacaacaacaaaaagaaacagcatcaaggctccgggaagtgagcagcccactctgtccaggcaggtccagggaggctcccagaggccaagacacctgagctgtggctaaacgtaaccaaacgtgtcagggcaggtgggcagggcatgggccaggaggggagccacggacgcgtcagcctcctgctcttggacttgagggagggcggcagacctttcagcacttctgtttcctcgtctgaaatggggatggcaggtctgcttcttaaaggaatgcgagttgaagagggagtctcgaatcccacagtatatgcccctagtgggccactcctcaccacaggtcatgatatgtcatagtctctgttctccctaaaatgttttagggagaatggtttttttggttttttggtttgtttgtttgtttttagatgggttctaactctgttgcccaggctggagtgcagtggtgcaatcatagctcactgtagcctcgacctcctggactcaagcaatccctctccctcagcctcctaagtagctgggactacaagtgtgtaccaccagacctggtgaacttttcagttatttttctttaagagacagagtcttgctatgttgcccagctggtcctgaatccatggcctcaagcgatcctcctgccttggcctcccaaagtgcttggatcatagatgtgagccacctgcctggcctccctaaaatgttaccaggcattccaaccaagaggagagccatcctttagatagaagatatagaatttttgaccaggcacagtggctcacacctgtaatcccagcactttgggaggctgaggcgggtgaatcacttgaggactggagttcgagaccagcctggccaacatagcaagaccccatctctactaccagtacagaaattagccgggcattggccgggcacggtggctcacgcctgtaatcccagcactttgggaggccgaggcaggcggatcacgaggtcaggagatcgtagaccatcctggctaacacagtgaaaccctgtctctactaaaaaaaatacaaaaaattagccgggcgtggtggtgggcgcctgtagtcccagctactcgggaggctgaggcaggagaatggcgtgaacccaggaggcggagcttggagtgagccgagatcgtgccactgcactccagcctgggtgacagagcgagactccgtctcaaaaaaaaaaaaaaattaaccaggcatggtggtgcacacctgtactccccactactcaggaggctgaggcaggaggatcgcttgaacctggggggcggaggttgcagtgagccactgcattctggcctgggtgacagagcaagacttggtctcaaaaaaaaaaaaaaaatctagaatttttgcctacataggacgttcaaccctggatgtctcttttcacagattctctgtttgactgaacattagactcctgaaccttgtcccagtcccatctgtgcacttctttataaaatccagtttcagctgagaccctgctaagtcagtttaacaggaaccctctgcccttgagagctgatcacccttgatgtctgatcgggctctgtatcttcccccataccccaggtactatctgatcaccctggcctgtcttcagcaagaatcctgttaggtcggtttagctagaaactgctgtatgctcagtgtttcctcttagtaattttccatccactgacccccaccctgctccttggttataaagtcccgcttgcccaagccatattcagatttgagcccaatcattctcccccactggaaggccccatcacagtagtgggaataaaggcatcctgcccatgtgttaatgagtaccattgaataatccttttttgagacggagtctcgctctgtcacccaggctggagtgcagtggcatgatctcggcacactgcaaccgctgcctcccgcattcaagcgattcttctgcctcagcttcccaagtagctgggactacaggcgcacgccaccatgcccggctaatttttgtatttttcgtagagacagggtttcaccgtgttggccaggctggtcttgaactcctgacctcaggtgatctgcccgcctcagcctcccaaagtgctgggattacaggcgtgagccactgtgcctggccctattgaataattcttctctaactttctcaattcaagaaacctttttaaattgcccagaagaaaaatctcaaaggcaggggcgtttggaaggcggccagacttcttccagccctcaatgtccctggtgggcacatggcatccccactgggcccacacctaggccagccctgtcagaggaagaggcaagactgcctctacgttagttttacctagaaaccgtgactggggggaagctgaattatgaccaatagctttatggatttctttcttctgtgcttttcacgaggtttttaaaatttttctttaatttttttggggggtggggcggggaacagggtctcactctgtcgtctaggctagagtgtaatggcacaatcatggctcactgcagcctcaacctcctgggctcaagtgatcctcccatttcagccccctgagtagctgggactagaggcatgcatcaccacgcctggctatttttttcttttttgtagacacaggatctcacggctgctcttgaacttcctgggctcaagtgatctcctgccttggcctcccaaattgctgggattacagttgtgagccactgtgcctggcttattttatttctttttttttttttttttttttttttgagacagagtcttgctctgtcacccaggctggagtgcagtggtgcaatcttgactcactgcaacctccacctcctgggttcaagcaattctcttgcctcagcctcccaagtaggagggactacaggcttgtgccaccacgcccggctaatttttgttatttgtagtagagacggggttccaccatgttggccaggctggtcttgaacccctgacctcaagtgatccatccaccttggcttccaaagtggtggaattacaggtgtgaacgacagtgccaggccttattttatttcttatttatttatttatttattattattatttttttttttttttttttttgagacagagtctcgctctgtcgcccaggctgaagtgcagtggcgcaatctcggctcactgcaagctccacctcccaggttcgtgccattctcctgcctcaacctcccgagtagctgggactacaggcgccaccaccacgcccagctaatttttgtatttttagtagagatggggttttaccatgttggccaggctggtcttgaactcctgacctcaagtgatccacccaccttggcttccgaagtggtggaattacaggtgtgagccacagcgccaggccttattttatttcttttttatttatttatttatttatttttgagacggagtctcgctctgtcaccaggctggagtgcagtggcatgatctcggctcactgcaagctccacctcccaggttcgtgccattcccctgcctcaacctcccgagtagctggaactacaggcgccgccaccacgcccggctaattttttgtatttttggtagagacagggtttcaccatgatagccaggatggtctcgatgtcctgaccttgtgatccgcctgtctcagcctcccaaagtgctggcattacaggcgtgagccactgcgcccggcctattttatttctaattgatgaaagttgtatatattcatgatgtgcaacatgacattttgaaatacgtatacattgtggaaagggtcaatggagctaattaacgtacgcgttacctgacatactcaacatgttttgtgatgaaaacacttaaaatcttctctcttaggaattttcaaaatacaaaaatatttacagtcaccatgttatacaatagatcgcttgaatttattcctcctctctaattgaaatttatatcctttgaccagcatctccccaaccctgccgccacccccggtaaccagtattctactttctacttccgtttttttgagacagggtctcgctctgtcacccaggctggagtgcagtggtgcaatcacagttcactgcagcctcaacttcctgggcctaagcgatccttctgcctcagcctcctgagtatctaggacaacaggtgtgtcccaccacacctagctttttattttttgtaaagatggggtgtcactatgttgcccaggctggtctcaaactcctggcctcaagcgatcctcccatctctgcctcccaaagtgctgggggattataggcatcagccacagcaccagccctactttcctacttcttttttttctgaggcggaggtctcgctctgtcacccaggctggagtgcagtggcaccatctcggctcactgcaagctccgcctcccaggttcacaccattctcctgcctcagcctcccgagtagctgagactataggcacccgccaccacgcccggctaatttttttgtatttttagtagagacggggtttcaccgtgttagccaggatgatctcgatctcctgacctcatgatctgcccgcctcggcctcccaaagtgctgggattacaggcgtgagccaccatgcctggcctgctttctacttctgtgagtttttttttggactgggggtacatgtgtagtttgttacagggatatattgggtaatggttagggttgggcttctaaaatacccatcactcaaatagtgaacactgtatccaataggtaacttttcaaccctcactcccttcctcccctttcccactatgagttcaacttttaaaaattctacacgagtgagatcatgcagtatttgcctttctgtgcctggcttattaacatagtatccctcagcttcatccatgttgttgcaaatgacaggatctctttgttttttttttcgttttgtttgttttttttttttttttttttttttttttgagacagactctcgctctgtcacccaggccagagtgcagtggtgcgatctcagctcagtgcaacctctgcctctcggtttcaagcgattttcgtgtctcagcctcccctgtagctgggattataggagcccaccaacatgcccagctgatttttctgttctagtagagatgagattttaccacgttaaccaggttggtgtcgaactgacctcaagtgatctgcccaccttggcctcccaaagtgctggaattacaggtgtgagccaccatgctcagccaggatctccttttttatggccaaatactattccatagtgtatataaaccacagtttctttatccattcatctgtggggttttttgttttttttcgagacggagtcttgctttgttgctcaggtcggagtgcagtagcacgatctcggctcactgcaacctccacctcctgggttcagacgattctcctgcctcagcctcccaggtagttgggattacaggcatgcaccaccacacccggctaatttttgtatttttagtagagacggggtttcgccatgttggccaggctggtctcgaactcctgacctcaagtgatctgcccaccccggcctcccaaagtgctaggattacaggagtgagccactgaacccagcctattcattcatctgttgatgcacacgtcttggctattgtgattagtgctgaaatgaacgtgagaatgcaagcatttcttccacgtactgatgtcatttcctttggatatatacccagaagtgggattgctagacctagtgagataataatttttttccaaagtttacaacttatattagaaacatgttttttatattataaaagaaaaaaaaatgtgtttctgttaaaggagaggcgttttttggttttgagtgagtccagcgctgtgggttttatagcctggggggaccatggcatccgccttcccggtgcgtgtgccagattatatcgcatagttgttgacaccggggtcccacttcctcccttctgtccaccctggaccccacatgatactccaggcacaccagccacccttgtgctttgagaccgtgcgagcccccggccagcccagccaagcagcaacacaatagcacccctcgctgcgagcgctgggccgcacttccccctcggatgtataatagcaccaaccggatatttttagatgggctttgaaaagtcgcagtgtgctgagaccgcataccagacgcgtgaggtcaccgggcctgggagcagcctctatgcatggataattggtgcacggggtaatcgggtaatcgcagaaccagaaagccagcccttgggcagccatggtggtgggaggggcccctcatatcccaaggcgttccctgtgttacgttcccaagacaccaggcctggctgtgatattagaagtcactgcagagacttgtcccctgggtttaaagtgagcactgtggctctttaaggtacaaatgtacatttctggggcacctctgccacagaccaggctttacaccaaggtactacggggaccctgactcagagagagacccgtttcctgctgcagacaccccagggccaccaacaggactgtcccccccaccccacccctgaggacaggcatccctttgccatctgctcatagttaagcagggaagctttctgagccccttcctgggacgttattttagggtttccctgacagatctctttgaattgagggtgactggggaggagagtctggtcgtgggaccacataggtgaggctgggcttcgtgctgtcaggcagggagcaaggaggagggcctaggcccaggcaccgggccccaggctgaagctgatttcctgcgtgagctccagactatggccctgcagggtcccgtgagcatccaaggagacgagtcagtgcctcgagactgggggtttcactccaaataacaacaaaaaacagttctccagctaccctctggagagctggaaatgaaacctagaaagaccgcagggacccctcagcacctagaatgcagcacatatgggaacctatggaagggacaaagggaccagtgagccccgactacccagccctgcaaccccttttatttctgtctgtgtacatcaatgctccgcagccggggtgatttgccgatctctggggacattctttggttatcccagatggcatcgggtaggtggaggccagggacgctgttcaacaccgtgtagtgcacaggacgcccccatcacacaggatggttcaccctcaaaaagtcccataggcacccaggaaagtcaacttcaccagcagagcccttggtggttcccgcccaccgaccagccccctgggtttcatcagaccctccagagactgtttcaaagttcaacaggtcagaccgggcccagtggctcacacctgtaatctcagcactttgggaggctgagatggaaggattgcttgagtccaggagccccagaccaacctgggtaacacagtaagattcgtgtcgacaaaaataatttttaaaattaggccaggcacagaggctcacgcctgtaatcccagcactttgggaagccgaggcgggcagatcacctgaggtcagaagttcaagaccagcctgaccaacatggagaaaccccgtctctacttaaaatacaaaattagccggggtgatggcgcgtgcctataatcccagctactcgggaggctgaggcaggagaattgcttgaacccaggaggcagaagttgcagtgagccaagattgtgccattgcactccagcctgggcaacaagagcaaactgtctcaaaaaaaaaaaaaaaaaagccaggtgcggtgatacatacctgtggtctcagctccttaagagacagaaatgggaggatcgcctgagcctgggggttgaggttgaggctgcagtgagctatggtcgcaccacttaaactccagtctgggcgacagagtgagaccctgtctccctgtctcaaacaacaacaacaacaacaagaggtgagcaaggctcatgtggtgacccagtccgcccccaccaaaagcacccggctacttcccagacccccttctctgtagaggaccaggtcatctctctctggggccccctccttatcaccttcctgcttggctccgtgccccatgatcttgagctcctccctgtttccttgtcccatgacccaaacagccagctccttgagtagtgtgacccgcacatgggtccagccacagcaactgtccgggcttcaagctctgcccgaggctttgcagctgaatggagccttctccaagggagtatctgggcctcccatggtcagatcctttttttttatttgaaacagagtctcgctctgtcgccgaggctggagtgcaggggcgcaaatgcagctgcagcctcaacctcctgggctgaagcaatcctcccacctcagcctccaaagtaactggaactacaggcacccaccaccatacctggctttttttttttttaatactttaagttctgggatacatgtgcagaacgtgcagtttcgttacataggtatacacatgccatggtggtttgctgcacccatcaacccgtcacctacattaggtatttctcctaatgttatccctctcctagccccctaccccctacaggccctggtgtgtgatgttcccctccctgtgtccatgtgttctcattgttcaactcccatttatgagtgagaacatgtggtgtttggttttctgatcttgtgatagtttggtgagaatgatggtttccagcttcatccatgtccctgcaaaggacatgaactcatccttttttatggctgcatagtattccatagtgtatatgtgccacattttcttaatccagtctatcactgatggacatttgggttggttctgagtctttgctattgtgaatagtgccgcagtaaacatacgtgtgcatgtatctctatcgcagaatgatttataatcctttgggtatatgcccagtaaagggattgctgcatacctggctaattttttaaattttttctagatttggggtttcgccatgttgcccaggctggtcttgaactcctggcctcaagccatcctcctgccttggcctcccaaaatgctgagattacaggcgtgaccactgcgcccagccactcagttgcatttttaatgggacttccccattcaggctgccccacaaaagcctccactcagtggtcagccagtgtcttaatctgttcgggctactgtcacagaatatggttacgcattgcttaactatgggagaaatgcgtcattgggtgatattgtggtcacatgaacatcctagaatgaacttacacaaacctagatgatataacctactacacacttcggctgtaggtgtttagtaggttatatactactaataggtgtgttaatatgtaaccactaataggctatacctatacaaatagatgtagctggccaggtgcggtggctcacgcctgtaatctcagcactttgggaggccaaggcaggtggatcatctgaggtcaggagttcaagaccagcctggccccgaactctggtgaaaccctgtctctatttgaaaatgcaaaaattagtcgggcatggtggctcgcgcctgtagtcccagttactctggaggctgaggcaggaggatagcctgaacctgggaggtggaggttgcagtgagctgagattatgccactgcactccagcctgggcaacagagtgagactcgatctcaaaaaaagcaaaaacaaataggtataacccattacttctaggctacaaacctgtacagcatgttactgtactgaatactgtgggcagttgtaacacaatggtaaatatttgtgtatctaaacataggccaggcctggtggctcattcctgtaatcctagcactttgcaaggcctaggcaggaaaatcgcttgaactcaggaggtcgaggccgcagtgagccaagatcacaccaccgcactccagcctgggcgacagaccaaaattctgtctctaaatagatagataggctggttactttggctcacacctgtaatctcaacactttgagaggccaaagtatgcagattgcttgagcccaggagtttgagactggcctgggcaacacagtgaaacctcttctctacaagaaaataagccaggtgtgctgacacgtgcctgtagtctcagctacctgggagcttgaggcgggaggatcaccttgagctctggaggttgaggctgcagtgagccatgatcatgccactgcactctagcctgggcgacagagtgagaccctgtctcaaaaaaacattggatgaatggggctgggcacattggctcaggactgtgatctcagcactttgggaggccaaggcaggcggatcacctgaggttgggagttcgagaccagcctgaccaacatggagaaaccccgtctctactaaaaatacaaaattagccgggtgtggtggtgcatgcctgtaatcccagctattcgggatgctgaggcaggggaatcacttgagcccgggaggaggaggttgtggtgagctgagatcgcgccattgcaccccagcctgggcaacaagagtgaaactctgtctcaaaaaaaaaagaaaaaatgattggatggatggatggatgggtggatggatggatgcatggatggaaacatagaagcagtacagtaagagtacagtattataatcttatgggaccaccgtcatatatgtggtccatcgttgatggtcattgctgtgcagtgcatgactgtaccatgtagaccaggtggctgaaacaacaaatatattctcacagttctgaaagtgagaagttcaaggtcaaggctctggcagatttggtgtcaggtgaaggccctcttcttggttcattgatggtgttttttcccatgtcctcacacggtggaaggagtgagggtgctctctggggttctcttctataagggcactaatcccattcatgagggccccatgtaagtgacctcatcacctcccaaagacctcacctcctcaacctatcaccttagggttagatttcttttttttttttgagatggagttcactcttattgcccaggctggagtgcaatggcacgatctcggctcaccgcaacctccgcctcccgggttcaagcgcttctcctgcctcagcctcctgagtagctgggattacaggcatgtaccaccatgcccggctaattttgtatttttagtagagacagggtttctccatattggtcaggctggtctcaaactcctgacctcaggtgatccgcctgcctcggcctcccaaagtgctgggattacaggcgtgagccaccgtgcccggccagggttagatttcaacatataaagtttgtcgggggccaggcatggtgactcaagcctgtaatcccagcactttgggaggccgaggcaaggagatcacttggggtcaggagttcgagaccagcctggccaacatggtaaaaccccatctctactaaaaataccaaaaattagccgagcgcagtggcacacacctgtaatcccagctactcaggaggctgaagcacgagaatcacttgaacccaggaggtggaggttgcagtgagccgagatcacaccattgcactccagcctgggcaacagagcaagaccctgtctcagaaaaaaaaaaaaaaattgtgtgagggacacagacatgaagtccataacaaccagtatccatccccctgtggaatgaggccttcaggaagatcctgtctctctgtgtcattgtgtctccggtttccgcctccctggtgtgcttggccaccacctaccccaccccctacaatgggaccttggcaatggccttgccacttccttcacactgtggcctcgctctctcctatcccctgggtggcccagcctctcaaatgggagcatcactgctgccaaactttccacgtgtgactgcagggcgtgccccctgcccctgtgccctccccttgccatgttacctcttccccaaacctagcggtcacaaggactgggacagtggaacaccaggccccaggaccagctctgctgcctctctctcatctacaaggccttacagcccgcatcctgctggcctcaccccatcttctttttcctaaacgaaagagcccccaccttccgccagccaccacctcttctcagcttctctgtcctgccccaggcaccttccctgcctcaagttcccccaggggctccgtcttaaccactctggagcagtaagtccctcatgggaagggggcaccccaggaatctggacagagtgtaggtgtcccccatcttcatccaggtgatggttacatggaaggccccagaggggacccctgcacactccctgcactgcacacacttccctgtatgtgtggactcctcagtacagagcaaaaagattgtcctgtgaaaaaggaatgaaacattgattacaggtgagccaccgtgcctgtcatcacagccctttcggaggccgagttggaaggatcgcttgaggccgggagttcaagaccagcctgggcaacttagagagatgcggtctctacaaaaaattttaaaaattagccaagcatggtggcatgcacctgtggtcccagctatttgggaggctgaggcaggaggattgcttgaggccacgaggtcgaggcttgcagtgagctatgattacaccactgggcgacagcaagaccctgccttttaaaaaaaaaaaaagaaagaaaaaagaagcggcaaccagacacaacaggccataagtgtatgacctcattgacctgagatacccagaacaggcaaatccatagagacaggaagcagattggtggttgtcagggactaggggagggaaatggggagggactgctgatggggacagtctccttttcgggggatcagaatgttctggaaccaggtaaaggcgatggctgcacaacattgtgaatgtactgaatgccactgaattgtacactttaagaaggttaattgtatgtcatgttttacgccaatttttttttaattgctctgtgaacccacttatcttcccaccaaactttagggctcctcaagggaccttccacataccctgccttgtgtccagcagtgagcccagaatccagatcagcccaaaactcctgccacaaagagcccgataggcaatatttgcaccttcgcagactagatggtagtctctgttgcaacacaattgaatgagcctggcatgtaccgataaaacttcattgatggacgctgaaatgtgaagaggtttttcacgtcagggaatattcttctttgggtttttgtttgtttgtttgttccttgtttcaccatttacaaatgtgaaaaccattcttggctcgcaggcgattaaaaaaacaagcatcagaccagatttggcccacagggtgtggcttaccctatcagatgaatggttacaactgaaaagaattcaggcaattgccatttttaatgtcagagacttaaaacttgaacaccggccaggcatgatggctcatgcctgtaatcccagtactttgggaggccaaggcgggcagatcacctgaggtcaggagttcgagaccagcctggacaacatgggaaaaccccgtctctactaaaaatgtaaaagttagccaggcgtggtggtgcacacctgtaatcccagctacccgggaaggtgaggcacgagaatcgcttgaacccgggaggtggagattgccgtgagctgagatcgtgccattgtaccccagcctggcaacagaacaagactctgtttcaaaaaaaaaacaaacaaacttgagcaccacacacaacctcagacacagagataaagagtgaaatgttggaatgggccttggctatacacctctgtatttttcaggtcttatctgggcttctaagtgacttatagcctactgtcttggggacaagtgagtgtcctcaaagccgagaaggagggaggcccagggctccaggctgaggcctatagaagctccatcctcgctggagcccattatccttagcaaactaacacaggaacagaacacctaatattgcatgttctcactttcaagtgggagctaaatggtgagaacacatggacacacagaggggaagagcagacagtggggcctcctggagggtgggaggagggagaggagcagaaaaaatactattggggccaggcacagtggctcacgcctgtaaatcccagcactttgagaggccggggcgggcagatcatgaggtcaagagatcgagaccatcctagccaacgtggtgaaaccccgtctctactacaaatacaaaaattagctgggcatggtggcacacgcctgtattcccagctatttgggaggctgaggcaggagaatcgcttgaacctgggaggtggaggttgcagtgagccgagatcgtgccactgcaccccagcctgggcaacagggcaagactctgtctcaaaataaaaaagaaaagaaaaagaaaaataactgttggatactaggcttagtacctgggtgacaaaataatctgtacagcaaatccctgtgatacaagtttacctacttaacaaacctgcgtgtgtaccccaaaaccttaaaagttaaggctaggcatggtggtgcatgcctgtggtcgcagctacttgggaggctgaggcagaaggatcccttgagcctgggagacagaagttgcagtgagctgagatcatgccactacactccagcctgggcaacagagcgagaccccatctcaaaaataatattaaaaggttaaaaaataaagtttatttagacaacagataaaatgatgtttttgcaaattatgtcacaatctggaaaatattaattaaataaaccgagtctgggcatgatggttcatgcctgtaattccagcactttgggagaccgaggcgggtggatcacttaagctcaggagttccagaccagcctgggcaacatggcaaaaccccatctctacaaaaaattagccaggcgtggtggtgcatgcctgtggtcccagctgctcaggaggctgagacaggcggatcgcttcagcctgggaggcagaggttgcattgagccaagatcgcaacactgcactccagcctgggtgacattgtgtgaccctgtctcaaacaaaaaaaaaaagagtgaaagaaaatgggctactctctgcttactgggtagccctactttgcaggaacagttaaagaaaaaataagagaccaggggtggtggctcatgcctataatcccagcactttgggaggccaaggtgggcggattgtctgagctcaggagttcgagaccagactgggcaacacagtgaaaccccgtctgtactaaaaatacaaaaaattggccaggcgtggcagcgtgcgcctgtaatcccagccactcgggaggctgagccaggagaaccgcttgaactcgggagacagtgcttgcagtgagctgagattgcgcccctgcactccagccaaggcaacagagcgagacttcatctcaaaaaaaaaaaaaaaaaaaaaagaaaaagaaaaaatagagactgggcacagtgactcatgcactttgggaggctgaggcgggcagattgcctgaactcaggagttctacgtcagcctggacaacatggtgaaaccccgtctctactaaaatacaaaaattagccagcatggtagcgcacatctgtagtcccagctactcaggaggctgaggcatgagaattgcttgaacccgggaggcagaggttgcagtgagccaagattgtgccacttcactccagcccaggtgacagaacaagactgtctccaagagaaaaaatagataaattgaacaatacaaaatataaaagcacagtgtaaaatgagaggaaaaaaaagaaaaagaaattccaccctcctgatctgaaacctgcttttgatttccttgcaggcttttggaaatgccaagacagcccacaacaacaactccagccggtttgggaaattcatccaagtcagctacctagagagtggcatcgtgagagggtgaggtgtccctggggtccccactggtgggagctggccccacgcactgttgcttcctgacacacacatgggagtgagatgtggagatcatggctgtgtggatgtttatgctttgtatgggagagcgagtgtgatttttaggtctttgaggtgaaggtctggaacagtaggttgaagtaggaaatgtgggcaggggctgggggacgtggctagaggtagtgggctttaccgagaacaggcaaggacagcccagcccatttcctgtcttgataaagtttctaatttggtaggtcttgggggtgtcacaggcagtggggatgcggactctggcctttgccaaacatgtgctcctttagccagaaaatgacaggtacagagctgcaaagtgaggtggtcgtgcatggaaatactgaagggtgggtgggtggatggactcatgaggggatggatggatggatggatgatggatggatggatggatggatggatggttagagagacagatggattcatgggtgaatggatttgcacgtagatggatagacagatttatggatggatggatggatgaattcatgcatggatggctgaatggatggatagatgaattattgggtgaatggattcatgagtggatggatgaatagattcatgaatgggtgggtggatagatggatggatggatggatggatggatggatggatggatggatggatggatcgatggattgattcatgggggagtagattcatgggtggatggatgcattcatgagtggatctacccatacactcatgaatccatccatcacaggtggatgggtagattcatgggtaggtgaatgaataaatgggtagattcatataatgaatgggtggatggatagattcatggatggatggatggatggatgggtgggtggatggatttatgggtgagtggattcacaggtggctggatagatggattcttgggtggatggatttacaagtgaatggatagaatcataggtaggtggacgaataaatgagtagatttgtgggtgtgtggatgggtggatggatggatagatagatggattcatgggtggatggattcatggatggagagatacatggattattcatagatggatgagtagattcatgggtaggtggatgaataaatgggtagattttgtggatgtgtcaattagcgaatggatagattcatgggtaaattggatggaattggatgggcttgatcagtggatccatggatccattgatgggtggatgagtacttagatggcatctgagagggtccaaggcctggatactcacagggatcccccactaactatagattctcatgtgaggggctgctgtgtcaatgggatttgtaaaggtcccaggattttgtctgtctgaacctgactgatgatcatttcaactgatggttcatattcaagatacaaacaggcatattgttctcctgaaccttccgcctctagcttcatttctttttcccagtgcccaggctccagtaggcagtggtgtgggtgagtggcccttgacaaatgtcaggggctgctctggcccctcggcctcagcccccacaaggcagtcagtggccccccaactcctaccacctgcccacatgggtgtacccggttcatcagaaacacctggaacagccacttgtcccacctgtcttccaggccctgacctctccatgaagaccccacctttttcacttcatattttgggggttaaaatacacaacataaggccaggcgtggtggctcacacctataatcccagcactttgggaggccgaggtgggtggatcacctgaagtcgggagttcaagaccagcctgtccaacgtggtgaaaccgccatctctactaaaaatacaaaaattagctgggcatgatggcaggcgcctgtaatcccagctactcaggaggctgaagcaggagaatcgcttgaacccaggaggcggagattgcagtgagccaagatcaggccactgcactccagcctgggtgacgagcgaaagtccatctcaaaaaaaaaaaaaaaaaaacccaacaaccaaccaaccaaacaagcaaacaaaattagctgggcgtggtggtgcatgcctgtgatccagaaattacaagtgtgagccactgcgcccagacactatgtttaattttttttttttttttttttttttttttttgagacagagtttcgctcttattgcccaggctggagtacaatggcgtgatctcggctcaccgcaacctctgtctcctgggttcaagcgattctcctgcctcagctcgagtagctgggattacaggcatgcgccaccacacctggctaattttgtatttttagtagagatggggtttctcaatgttggtcaggctggtctcgaactcccgacctcaggtgatctgcccgccttggtctcccgaagtgttgggattacaggcgtgagccactgcgcctggccatttaattttttaagaagccaccatactgtctcccatggaagccacaccattttaccttcccaccagcagtgcacaaaggtccccacctcttatctttggttttctttttcttcccgtgggtccatcttttgcacgatcctatctgccacattgcagagattttgacccacaggaagcattcagggtaccttgttgggaagatgacacagatactgttgctacagttccatgcctcccttggggagaagctaagctgcctccttgtcttgtctgggtgtccagctggctctggacagacactgcaggcttgacctccgcatgggcaccgccccctttccaacattatctctgtatgcatttcctaggagggactgccataacagtgtacgacaaaccgtatggctgaagcaacaggaattattctcttatcatcccagaggccagaagtcggatatcaaggtgtccacagggctggttccttctggagtctctagggaaagatcctggctacctcctccagcttctggtggctcccttggctcatggccacattactcccatctctgcctctgtcttcaggtggcatgtgtctctcctctttttatttttttattttttggagacggaatctcaccctgtcgcccaggctggagtgcagtggtactatctctgctcactgcaacctccgcctcccgggctcaagcaattcttgtgcctcagtctcccaagtagctgggattataggaatatgccaccacacccagctaatttttgtatttttagtaaagacagggcctcactgtgttggccaggttggtctcaaactcctggcctcaagtgatccgcctgcctcggcctccccaagtgctgggattacaggtgtgagccaccacgcccgaccccctcttctaaggacatttgtcatcggatttagggccctcctggattattgaggatgatcctgaggcctttaacttaatggcctctgcaaagatccttttttatgttttgagacagggtcttactttgttgcccaggctagagtacaatggcatgattatggctcactgcagccttgaactcctggagtcaagcgatcctcctgcctcagcctcctgagtagctgggactacaggtgcacacccccacacctggctaattttttatttttattctgtagagacggggtcccactgtgttgtccaggctggtcttgaactcctggcctcaagcgatccttccaccttggccccccaaagctctggggattacaggcatgagccactgcgcccagctccctttttccagataaagtcatatccccaggttccaggagacataacttccagggcccaccattggaccagacaccagaagggctggcctggcccagcccatagctaaatggtttagcctccccgaccttccccaggctcccatcatattcaggaccagtggacctccatggccaggtctcccagaccagctttggaaagtcgtatctgtggccttggattcaggaaagggagtcctgcctccacccacaacctcaggactgtggccatcctcgccccagggagggaggtgcacttcctatcccaagaatggccgcagcgatcacacaaagagccggctcagaccggttctgcttttgcccactttcaggcaggtgacacttctccatgccattcccaccaaggccaagggtcaggcacagtccaagcctccccacccagttctccaatttatgaggctgcagcttcctgtgtgttcaaggactcagtgctggaggagccctgggtccctataagaccccttttttaggcccaggccttgaaaatgattggggaagggaaggggccatcatctgtcaagcgacattttgatgccagacctgcagatgcagcacggggaatcggccacaggctgagattgaaacatgagtttcctcctagaaacggacacagcctccctccccaggaatgcaggaaggtgctgaaactggttactagcccggcaaaggaatagaaggaaacatttttttctcctatttgaaagaagagaggacccaggctgggccatcagaagccacctgtgcatcgtgtgtgtccctgtgtgagcctgcagacaaaagactgctgtcttgggctgggcgcggtggctcacgcctgtaatcccagcactttgggggagtgatgcggtggatcacctgaggccaggagttcaagaccagcctggccaacatggtgaaaccccatctactaaaaataacaaaattagccaggtgtggtggctcatgcctataatcccagctactcgggaagctgaggcaggagaatcacttgaacatgggaggcagaagttgcagtgatcccagatcatgccactgcaccccagcctgggtggcagagtgagactccgtctcaaaaaaaaaaaaaaagactgctatgctggagagacaggcgttcagcagaccctgaattgggaacctcgtgctgtcccctggccctgccactccttgggcaccagctgtgtctcctgcataacaggatgggctcagatgagggtgatctggaggccccagtgagctcacatgtctggtgatggcggaccctgtgatagaccggccccaccagacttagccagccccagctggtgcgaaaggatcccaccaggccaccctcttcccacaggggccctgggcagcacatagtctcaccaagccttggctccttgtccactcctcaggagccaccgtgcctgccccagtatggaagaggagtccctgagaaatacatcaaatgatgcctagaacatatttttcctcgaaaaaacattcactgccactacttttagcattgagagatatttggggctgcagagacaccccagtccctgtgctggtaccctcagactcaaggtcccacatgatgccaggtgcctcctgagggacctctgagaacttaatttggaggaaacactttaactgcttggcacagagaaaatgattggtaaggccgggcgcagtggctcacgcctctaatcccagcactttgggaggccaaggtgggtggatcacctgaggtcaggagttcgagaccagccttgccaacatggtgaaacctgtctctactaaaaatacaaaaattaactgggcgtggtggtgggcgcctgtaatctcagctactggaaggctgaggcaggagaattgcttgaacccaggaggcagaggttgcagtgagctgagatcacgccattgcactccagcctcggcaacgagagcaaaactccatctcaaaaaaaaaaagaaagaaagaaaatgataaataaacggcagaacaccagaccatatggatacaaccaagtattgctgggtatcacagacccctgtgcttccaaggacactgtgacaaaattggaaaggaatccccagacccagagaaggtacctgcaaatcagaaccagcaaaggacttgcatctagaatatagaaagagcatttacagctcaataaaaggaccaacacccaataagaaaaccacaaaagacgtcaatgtatacttcatcagagaagagctatgaatggccagcaagcacatgagatgttcagcatcattggtcatcagggaaatgcaaatccaaaccacagtgacaggctagatgcatggctcacgcctgtaatcccaacacttcaggaggctgagacacgtagatcacttgaggccaggagttacagaccagcctggacaacatcacgaaatcccatctctacaaaaactacaaaaactagcctgtagtcccagccactcgggaggttgaggtgggaagatcacttgagcccaggagaacaaggctgcattgagccattatcgtgctactgcattccagcctgcacaacagagcaagatcctgcgtcaaaacgaatgctgggtgcagtggctcatgcctataattccagcatattgggaggctgaggcaggtagatcacctgaggtcaggagttcgagaccagcctgaccaacatggagaaaccccgtctctactaaaaatacaaaattagccaggcatggtggcacatgcctgtaatcccagctactcaggaggctgaggcaggagaatcgcttgaactcaggaggtggaggttgcagtgagtagaaatcacgtcattgcactccagcctgggcaacagagtaagactccatcacaaaaaaaaaaaaaaacccacaaggacataccactgctcacccactagggtggctagaataaaaaagacagtgaataacaaatattggccagggatggtggctcatgcctgtaatcccgcactttgggaggccaaggcgtgcagatcacttgacataggtcaagagtttgagatcagcctagccaacatggcaaaaccccgcctctactaaaaatacaaaaattagctgggtgggggttggcacacccctgtagttccaaccaaccactgtgggggccgaggcaagagaatcgcttgaacccaggaggcagaggttgcagtgagccgagattgtgccgttgtactccagcctgaacaacagagcgagactcccatctcaaaaaaaaaaaaaacaactcaatattaacacaatactaaaatgtaatgttttattctttctgtttttctcttaatgacagagctgtcgtcgagaaatatctgcttgaaaagtctcgcctggtgtctcaggagaaggatgagaggtaggagaatgttttcccaggaatctctgaatgccacgccatgtctacgtttcctcctacagaggagagaagcaaagcaaacgtcctgaggtcggaggaattctgggggaggccgtggaggctctcacaggagcagggcctgcccatccatcttctccccagacctgcccctgtggcctcacactttgtcctcatacctcccaagccacctttgtgtgcctccctggaggttttatccccagtatgtgctcagatgtctgcacaaaatatacttagattggaaacatttctcaagcatggtagcacgtgcctgtagtcccaactattcaggaggcctaggcgggaggatcgcctgagcccgggaggttgaggctgcagtgagctagacaccacacttcagcctgggcaacagagcaagtccttgtctctgtttttggttggttggttggggtttttttggtttgtttgtttgtttgtttttgtttttgtttgtttgagtcagagtcttgctctgtcacccaggctagagtgcagtggtgtgatcccagctcactgcaacctccgcctcctggattcaagcaattctcatgcctgaggcgactctcatgcctcagcctcccgagtagctggaattacaggcatgcaccaccacgcccggctagagtccttgtctcttttaaaaaaaaaaaaaaaagaaaggcctggagcagtggctcacacctgtaatcccagcactttgggaggcctaagaggcaggatcacatgaacccaggagttcgagaccagcctgggcaacatggcaaaatcccatctctacaaaaaagaccaaaaaaaaaaaaattagctgggcatggtgacacacacctgtagtcccagctactcaggaggccgagctgggaggatcacttgaacccaggaggtcgaggctgcagtgagctgtgattgcaccactgcactccagcctgagtaacagagcaagaccgtatctcaaaaaaaaaaaaaaagaaaagaaagaaacatttctgattgacaaataagtgagatgtacacccacccacctccaatcctccagaaatctactcgctcacgacactcatttgttttgttttgtttttttaagacatagtaagaactgacgtactgttttaaatttgtacatatttgaggtgtgctctccaaagccatgttagtagtggttcgcagagtagctattacttggcctccaaaaacaactattttcctcccaattttgacctgtaggaactaccatgtgttttattatttgttacttggggtcagcgaggaagagcgccaagaatttcagctcaagcagcctgaagattatttctacctcaaccaggtaaacagcctcaagcccgagccacaaacgccacctctgttcccggcctcaagctgtttatgtatagccgggaagtcagaggcagcctgccctggcccccgaacccgctcccagaaggcagcattaaaagaacccattcattcccctggtcctggggccctgccccaccagctccagccaaaatcactctggcacgccacccttgccggcccaggaatgcccagagtacccatgcctttgttttccagcataacttgaagattgaagatggggaggacctgaagcatgactttgagaggctcaagcaggccatggagatggtgggcttcctccccgccaccaagaagcagtaagtgtgcgggctcccggggcctgtcccccagagcctacagggggcacgcatggcccttaccagtcactctgaggtctaacctgcaacccagtgaaaacaggcaggcagtgtcctgaacagtgccgccatagggagtgtggcccaatagcagcgatcacatgagaaggggctcaagacattggtcattaggcgatgccaattaaaggtaacgtgaacatacttaacactgctgaattgtacccttaaaaatggtttagccaggctccacgtggctcactcacgcctgtaatcccagcactttgggaggccaaggtggaggattgcatgggcccaagagttcaagaccagcctgggcagcatagtgagacctcatctctacaaaaaataaataaaattagccaggcgtggtagtatgcacctgtggtcccagctacttgtggggctgaggtgggaggatcacttgggcctgggaggacaaggctgcagtgagccaccatgatcatgccactgaactaatcacgccactctgggtgacagagcgagacccagtctcaaaaaaaaaagaatgctgggtacggttgttcacacatgtaatcacagtgctttggaaggccaaggcaacaggaccacttaaagccaggagttcaaggctgtaagtgagctaggattgtaccgcttcatttcagctcgggcaacagagtaagatcctgtctctaaaaatcaaagaagttaaggtagtgaattttatattatgcttatgttactacaatttaattatttttttttttagatggggtctcgctctttcacctaagctggagtgaagtggcgagatcatggctcactgcagcctcgacctcccctggttcaggtgatcctcccacctcagcctcccaagcagctgggactacaggcgcgtgccaccacacctggacaattttttgtagagatggggtttcctcatgttgcccaggctaattttgaattcttgggctcaagccatccacctgcgtaagcctcccagcatgctggaattacaaacacaagccaccgcgcccagcaatttaaatttttttaaaccaggcatggtggctcatgcctgttatcccagctacttgggaggccaaggcaggaagatcgcttgagaccaggagttggagaccagcctgggtaacatagcaagaccccatcaatttttttttaaattatccaggcatggtggcacacacctgtagtcccagctacttgagaggctgaggtgggaggatcacttaagcccaggagttcacagctacaatgagctaagatggcacctctggcccgggcgcagtggctcacgcctgtaatcccagcactttgggaggccaaggcaggtggattgcctgagctcacgagttcaaggccaggctgggcaacatggcgaaaccctgtctctactaaaaatatgaaaaattagccatgcatgatggtgcacgcctgtaatcccagctactcaggaggctgaggcacgagaatcacttaaacacagaaggcagaggctgccgtgagccgagattgcgccactgcactccagcctgggtgacagagcaagactctgtctcaaaaaaaaaaaaaaaagatggcacctctgaatagccagtggactccatcctggacaacatagccagtgactggccagacacaagtaccatcccatcaagttcacagacagcattagacgtcaggacagtggttcctctggtgttggggggctctaggatccaggacttggaatgttctatttcttggtctgggggctagtcagagggatccgtacacttcttttttcttttgtgagacagtttcactagccaggcatggtggtacaaacctgtagtcccagctacctgagaggctgagataggaggctcaactgagcccggggaggttgaggctgcagtgagccgtgatcgcaccactgcactccagcctgggtgacagagtgagaccctgtttccaaaaaaaagaaaatagctgtctagccaggtgcagtggctcgtgccaataatcccagctattcaggaggccaagacaggaggatcacttgaggccaggagtttgagaccagcctgggcaacatagcaagaccccatccctttaaaaatatgtttttaaattagccaaatatggtggcctgtagtaccagctactcaggaggctgaggctgtagaatcacttgagcccaggagttggaggttacagtgagctatgattgtgtcactgcactccaacctaggcgacagagccagatcaaatccaggaaaaagataactgtctgcaaagtcacattccacagaggccatcctcaacagaggccttagacatttttcaaatttcatgcgttccgaccagaatttgctggttttatggattcagcccggttccctgggaagtatctgctgtcttaggaacgtagaaactacccaaatatgagtgccttttctttcccaggatttttgccgtcctctcggccatcctgtacctgggcaacgtcacttataagaagagagctacaggccgagaggaagggttggaggtcgggccacccgaggtgctggacaccctgtcgcagcttctgaaggtactgattgccacctctgtcccttctcaggcctggctcagggccgctggctatctctcagtacgagggaccatacccagaacttcctacgtcagctgaggtttcatcaaccaggacctcacgtcttccgctatcatctctacagtgttccttcctcatttctgatgagctctgtggacaggggcacctcctcctcccaccctcaagtgaaagcctctttaaaactacagctcaggggccgggtgcggtgtctcacctgtaatcccagtactttgggaggccaaggtgggcggatgacctgaggtcaggagttcgagatcagattggctaacatggcaaaacctcatctctactaaaaatacaaaaagaaattagccagtggtggtggtacatgcctatagtccaagcaacttgggaggcagaggcacgagaatcacttgaacctgggaggcagaggctgcagtgagccaagattgcgccactgcactccagtctgggcgacagagcgagactctgtctcaaaacaaaacaaaacaaacaaaaaaaaactacagcttggggctgggtgcggtggctcatacctgtaatctcagctactcgggagaccgaggcaggaggatcacttgaggccaggaggtccagactagcctgtacagcatagcgtctgtcgatctctacaaaaaatacaaaaattagccaggtattggtggtgtactcctgtaatccaagctacccagggggccaaggcaggaagattgcttgagcctaggagttcattgccgccgtgagctgtgatcatgccactgaactccagcctgggtgagtgacagagtaaggccctgtctcttaaaaaacaaaaaattctagtttgatcaagtcattttctcattggacctgccatcccctcctcctccaccggttctcagccaggggcagttctgcccctaggacacactgggcaatgtctggagaactttctggttgccatactctgggttgctcctggcatctgctaggtagaggccatggatgctgcccaacaccccacagcgcacaggacagccccccaatggcaaagaattatccaaccccaagtgcaaatggcagtgaggccgaggagccctaccccagtcttttgttttttaatccatttatgctttgcgttccattattggtacaggagccccagcttctgttgagttcttggggatatgtgagcatctgctgggatatttagagaaagcccctgccagccaggcacggtggctcacgcctgtaatcccagcactttgggaggctgaggcaggtggatcgtctgaggtcaggagtttgagaccagttcgagaacttcaggccccaaagcctgaccaatatggagaaaccccatctctactaaaaatacaaaaattaactgggcatggtggcaggtgcctgtagtcccagctattcgggaggctgagacaggagaatcacttgaacccaggaggcagaggttgcagtgagccaagattgcgccactgcactccagcctgagcaacagagcaagactccatctaaaaaaaaaaaaaaggagaaagctgccgcttattccccactcttgctgctggtgggcagagaccaccagctctgaaagggagcttggcagtgcggggagggatgagcgtgtcggctgtctgggtaaggtctaagcccaggccctgtgcaatggatgggaaccaccagctccaataggcaaggcggccacctggacccgtggctcgcactcacataaggcctgtacatacacatacccgggccacggagcatgagcatccggcaagcccgtgctatgtgggaattctgaaacctgccaagtgtaaaacagtacatcgcaggccaggtgcagcggctcacgcctataatcccagcactttgggaggcccaggcaggcagatcgcccaaggtcaggagttcgagaccagcctggccaacacagagaaaccccatctctattaaaaatacaaaaattagctgggtgtggtgacgggtgcctgtaatcccaattactggggaggctgaggcaggagaattgcttgaacccaggaggcagaggttgcagtgagccaggattgtgccactgcactctagcctgggtgatagagtgagactctgtctcaaacaaacaaacaaacaaaaaccaaaaaaccagcacatcgcgggtgggtgggtgggcttcaggtcccacttctaggcctggctgctgggggtccgtctcccagctgcctcaggctccgggcgttgcctcagtgataccaggacatgcctgataagtcctccatctcccttttccttctccctctccttgacctccaaacaggtgaagcgagaaatcttggtggaggttctgaccaaaagaaaaacggtgaccgtcaacgacaagcttatccttccctacagcctcagcgaggtgagctctgcccaggcactcacagggtgccagatcccaaaaaccaagtgggaatggtctttggaaagagccggcatgggtgggctgttctgtccctgaatgctagaatggaacctaggcagtgcctctgattgtcatgcaagctcaggtgtggcacaagccagcctgggaggcaaaccatgggcctcaggccagaacttgagccacatgcattcaactctgtgtttccagatgttccgtgtgcatgctggttctcactagcaatggttggccagatccagccctccacctggttttgctaataaagttttattggcacatggccatacccattcatttacataccacttaagactgctttggagccatagcagctaagcagagcagttgcaacagagaacatcaggccccaaagccaaaaataatgactccttcatcccttccagaaaagaatttgcccatccctagactctggaacatgacactgactacccttatgtaactcccagcctgtgagtctcaagcctgtgactctaaaccttgatcaggtgcctccctctggtctttgccccagcctggatgttttctctgtgctgtatttctcttgcatttttacatctcaagagcaggatcacttgcagcttgtttaacaataggaaagtacctaatcacggcagggatttttagcccctcacccgatgggaagctgctgtggcatttcaaacaggcaccggggacattctgagcccacatgggtccagggcaccacgtgatattgctgcatatcacccaagacccgagcagcactggtgtccccagaggctccatgcagagccaaaggcaccaggcaggggctgcattctgtgtggctccatttccttgacacccaagaaatgcaaaacgagggggacacattctagatcttgtctgtagctgaatacatctgtcagagctgagacctgaatatgtggggaaaaaagccaatttattccatatagattagaccttaagagcttcttttttttctttttttttttttttttgagatagcgtctcactgttgcgcaggctggagtgtagtggcacaatctcagctcactgcaacctctgcctcctgggttcaagtgattttcatgcctcagcctcctgagtagctgggattacaggtgtgcgccactaggcctggctaattttttttgcatttttatttatttatttatttatttttatttttgagacagtttcgctcctgttgcccaggctggagtgcaatggcaggatctcggctcactgcaacttccgcctccagggttcaagcaattctcctgcctcagcctcctgagcagctgggattacaggcatgtgccaccacgcccggctacttttgtatttttagtagagacagggtttcaccatgctggtcaggctggtcttgaactcctgacctcaggtgatccacccgcctcggcctcccaaaatgctgggattacaggcgtgagccacggtgcccagattttttttttttttccttttgcatctttagtagagacgggcaatccacccgcctcggctcccagagtactgggatgacaggcgtgagccaccacgtccggccacaaaagagctttgatgcacacggtgacagccacatggtgcacccggaagaacaaggggcctgaagttagttagaccctccttgctggttctaccacagtcgcacgccccaccccctccccgagcccaggttcctcactcagcagcaattttggttgctctgaggagcgtatggaaaggcttcagcggccgttccagaggctactgggtctgttaacgcctcagtgtgcaggcacatcctccaggacagggtgaaatatgggtgttggatgagtcgagtgttgacagagaccaccttggctggttgcagtggctcacgcatgtaatcccaacacttacggaggccagggcagaaggattgcttgagcccaggagttagagtccagccttggcaacatagtgagaccccgtctccacaataaaattaaaaattaaggccaggcacggtggctcacgcctgtaatcccagcactttgggaggccaaggcaggcagatcgcttgaggccatgagttcgagaccagcctggccaacatggcaaaaccccgtttctactaaaaatacaaaaattagccaggcatggtggtgcgtgcctgtaatcccagctactcagaaggctgaggctggagaatcgcttgaacccaggagggagaggttgcagtgagccaagactgtgtcactgtacttcagcctgggcgatagaacaagactccacctcaaaaatatatgtatatattaaaaattaaccaggtgtggtgttgtgcgccatagccccagctacacaggaggctgaggcaggaagattgcttgagcccaggaagtggagtttgcagtgagccaagattgcgctagtgcacttcagcctggataacagagtgagaccctgtgtcaaaaaaaaaaaaaaaaaaagtacaaagggccatcttggccagacacagtggcttatgcctgtaatcccaggactttgggaggtcaaggcaggcagatcacctgaggtcagagtttgagaccagcctggccaacatggtgaaactccatctctagtaaaaatacaaaaattagccaggtatagtggcgcttgcctgtaatctcagctacttgggaggctgagacaggagaatctcttgaacccaggaggtggaggttgcagtgagccgagatcatgccactgcactccagcctggatgacagagcaagactccagcgcagggcctgccgtgccggaggtgagtcaccccctctgtgtccacaggccatcactgcccgcgactccatggccaagtctctgtacagcgccctgttcgactggattgtgctgcggatcaaccacgcactcctcaacaagaaggacgtggaagaggcagtctcggtgagtgcccccatttgcttcctcaagcccggccaggggaggccacatcctcactaccaatatccttggtgggcgacctggaacatccggagccgaggcatctgcaatcaagaggctgtttccccacaaggacaggcccaggaaacaggacaggctacgaaattcaacaggcccagggcagaatgaaaacataaggccccttattcaaaaacgacagattctggcatgtacctgtggtcccagctactcaggaggctgaggcagaaggattgcttgagcccaggaggtcaaggctgcagtgagctgtggtggcgccactgcactccaacctgggcaacagagcaagaccccatctccaaaaaaaaattatggattccatgctggtaatggcaaagtgttctgccgagcaacagggactggggacctaacaggtcacagcctgtagagccaacccctctcatgaaggctggctccctcggggtgcacctgcgggcagtgaccattttctctgtctctcccagtgcctgtccattggggtcctggacatcttcgggtttgaagacttcgagaggaacagctttgagcagttctgcatcaactacgccaatgagcagctgcagtattacttcaaccagcacatcttcaagctggagcaggtgcggaaagggcttttttgtcaattttttgaacttggtaaatcagacatcacgtgaaatttaccatcttaaccatttgtaaatattcagttcagcggcggtaagtacattcacatattcgcattgttatgcaaacgccaccaccatacatctccagaactctttcattttgccaaactgagactctgtccccatgaaacactcactccccattccccctcttgcaagccctgaactcaccccattccacttttttttttttttttttttttgagacagggtcttgctctgtcacccagctagagtggtataatcatagcttactgcagcctcaaactcctaggctcaagtgatccttcctcggcctcccgagtagctggaaccacaggtgcacactaccatgcctggctaatttttgtattttttgtagagacaaggttttgccatgttgctcaggctagtctcgaactcctgagctcaggcaatctgctcaccttggtctcccaaagtgttgggattacaggtgtaagccaccatgcctggcccattctattttctgtctctatcatttttgactaagtgcctcatataagtgaaattagacattatttgtctttttgtgactggcttatttcgcatagtataaagtcctcatggttcatccacatagtagcatgtgtcagaatttccttccttttcaaggctgagtaatattccattttctggatgtaccacattttgcttatccatccatccttcagtagacacttgggttgcttccagcttttggctattgtgcataatgcttctttgaacatgggtgtgcaaatatctcttcaagacgctgctttcaattctttcgggtatatacccagaagtggacttgctggatcgtatggtaattctgtttttaacttttttgaagaaccaccatactgttttccataacagctgcagcattttataaggaaatatcatgttgttgcacacccagcccaaagggaaaatagcatgagctagaaccggaatctccctagaggcccagatcattggtgaacttgccccagaatttttctcagtcaaaaggaaaacttaagaaaacccacccagcccaggatgaggcaaatgtcaggaatgttttgagccacagttcatgtgggggcttctgtgtccaaacagaaaatctttttgttagttgagaaacagggttgccttttaaggatttgcttagctcaaggacattgataacctatctgacgtgtctttttttttttttgagatggagtctggctctgttgcccaggctggagtgcagtggcacgatctcggctcactgcaacctctgcctccctggttcaagcgattctcttgcctcagcctcccgagtagctgggactacaggtgcatgccaccatgcccagctaattttttgtatttttagtagagatagggtttcaccatgctggccaggctggtctcaaactcctgatctcaggcaatcagcccaccttggccttccaaagtgctgggattataggcgtgagccaccgcgcctggccctgatgtgtctttttgcagctaaatagtcaaccatccttattcatgtcttctccttcacgttgatgattctgatgggaaaatgaaactgacaggcttatgtaaatatccagctgattttcctattaagctttttggcagtgaagcattgggagtgtagctggtcagaattaagttgtgcaggaagggtgtgacatacacactaaattgtgaagacttagcacatgagaaaaaagaacatacacggtctcagtaccttactgcagcctcaaacgctgaggtttaggcgatcctaccaccacagccccctgagtagctgagactgtagttgcacaccaccacacccagctagttttttggttttattttttgtagagacagggtcttgctatgttgcccaggctggtcctgaactcctggcctcaagtgatcctcccacgttggcctctcagtcatttttatgtcagttacacattaacgtgatcacattttagatacacagggttaaattaagtgtattattaaagttaattttgagccacacagaggcacatatctgtagtcccaactactgaggaggctgaggtgggaggatcccttgagcccaagaggtcgaggctgcaatgagctacagttgtgccactgtactccagcctgggtgacagacgagaccctgtctcaaaaaaaaaaaaattaattaatttcacctttttttttactttttacatgtgattattagaaaatttgaggctgggcatggtggctcatgctaacaataccagtggtttgggaagccaaggtaagaggattgctttaggtcaggagttcaaggctgcagtgacctatgatcacaacactgtaccccatcctgggcaacagagtaagaccctgtctctaaaaaaaaaaaatttgagatggagtttctgcgaaaaaaaatttttttattaaccaggcatatagtggcacatgcctgtagtcctagctactggggaggttgaggcaggtggatcactcgagcccaggagtttgaggctacagtgagctgtgatcgcaccgctgcactccaatgtaggcaacagtgtgagaccctgtctcttaaaagaaaaaaagaaaatgtgaagattcctgttggacaacatagctctggaacaggggccagcaaaccacagcctgtgggtcaaatccagtcccacaaattgtttttataaataaagctttattggcacatagcctttggtttgcattatcatctgtggctgttttcacatcacgactgttagttgcaacagacattgtctggttcataaggtgctatctggcccattacagagaaagtttgccaacctctaaatgattttaagtgtgattttttttttttcttgaggcagagtcttgccctgtcattcaggccggagtgcaatggtgcaatctcggttcactgcaacctccacctcccaggttctagtgattctcctgccccagcctccccagtagctggggtcacaggtgtgtgccaccaggcccggctaatttttgtatttttagtagagacagggtttcaccatgttggccaggttggtcttgaactcctaacttcaggtgatctgcccacctcagcctctcaaagtgctgggattacaggcgtgagccaccacgcccagcccttgtgtgatatttaaagtgccatgctgtgatcagtatttaagaatgtgcattcttgtttcctgtttacaatcattcatttatctagtaagtttatgtaactattaatgtattcatattgatttactcatatgcattttgttactgatatatttatgtttttttttttcactttgaagttcaggggtacatgtgcagatttgttacataggtaaacttgtgtcatgggggtttgttgtacagattatttcatcacccaggtattaaacctagtacccactagttatttttcctgatccgctcactcctcccaccctccaccctccaataggccccagtgtgtgttgttcccctctatgtgtccatgtgttctcatcatttggctccctcttataaataagaacatgcaatatttggttttctgttcctgcattagtatgctaagggtaatggcctccagctccatccatgttcctgcaaaggacatgacctcattccttttttatggctgggtagtattccttgatgtatatgcaccacatttgctttatccattagtgggcatttagattacttatttgttattgtgaatagtgctgcaaagaacacacacatgcagatacatttatatgtaaacatgcctattgatacataaatatgttcctacagtgtggggatcccttatccaaactgcttgggagcagaagtgtctcaggtttgggatttttttcagatttttcaatatttatattatacttactggttgaacatcccaaatctgaaaatccaaaatctgaaatgcttcaatgagcgttgtctttgagcatcacataacattggcagtccaaaagttttggatttttttttttttttttgagatggagtcttgctatattgcccgggctggtctcaaactcctggactcaagccatcctccagcctcagtaaagtattttttactttttattttttgcacagacaggatcttgctatgttgtccaggctggtcttgaactcctggcctcaagcgatcctaccaccttggcctctcagttactttttatgtcagttacatgttaacatgatcacattttggatatatcatgttaaattaagtgtattattagagctatttttttttttttttttttgtgacggagtttcgctcttgttgcccaggctggagtaggactaatggcgcaatcttggctcactgcaacctccacttcccgtgttcaagcgattttcctgcctcagcctcctgagtagctgggattacaggcttgtgcaaccacgcctggctaattttgtatctttagtagagatgggattttgctatgttggtcaggctggtctcaaactcctgacctcaggtgatccacctgccttggcctcccaaagtgctgggattacaggcgtgagccactgtgcccagccctattagagttaattttaagccacgcatcagtttaaaaagtttcctattttgaagcatttcagattttcggattagggatactcgacctgtatgcaatatatgttatgtagatattacatatctgggagataagaaacttaccgaccccgcgccacccctgcaggaggaatatcagggcgaggggatcacgtggcacaacatcggctacacagacaatgtcggctgcatccatctcatcagcaagaaacccacgggcctcttctacctgctggacgaggagagcaagtgagtgtccacaccccgtccatcccggcacatctacgcatgggcactgggtcaggttctgcagcccccagagccttaccccaaatccagactttcccaagagcgcctttttatttttgagacagggtctcactctgtcacccaggctggagtgtagtggtgcaatcaaagctcactgcagccttgacctcctgggctcaagtgatcccctgacgtgagcctctggagtagctgggactacagggtcacaccaccatacccggctaatttttgtatttctttgtagcaacagggtttcgtcatgttttccaggctggtcttgaactccttagctcaagggatcctcccgccttggcctccgagagtactgggattacaggcgtgtgccaccacgccagaccttgtgctgagaacttgtgtctgttcatttcacttgaccacaaaacccaagctcgtgtgtgcaaaatgcacaaacacctcattgtgaaaacatcaacacgtgtgattaattcgtgcacttgaggcacatccgccaggagttttcagcaaaggattatgggcctatgcctagaaactagacactggggccagacgtggtggggcatacctgtggccccagctactcaggaggctgagacaggaggatcacttgagcctgggaggttgaggctgcagggagctgtgatcgtgtcactgcactccagcctgggcaatggagcaagagacaggattggcgagttgttacaaagggcagtgcagtgtgtggaattgggacccagatgctgctgggctctggtctcacttctgagccttcctccctcatccccacagtccacagggcgctgtgaaggcagacaggtcaataaggcacctcattctgggtcacccagttgtagtcactgaaatcacgtgacacataccgaactactttcctgtggctcctctaaggaaccgctacaagccaggtgggctcttgagcccaggagatcaagaccagcctgggcaacacagaaagattccacctcggccaggcacagtggctcacgcctgtaatcccagcactttgggaggccgaggcaggcggatcacctgaggtcaggagttggagaccagcctggccaacatggtgaagccccgtctctactgaaaatacaaaaattagccgggcatggtgacaggcgcctgtaatcccagctactcaggaggctgaggcaggaaaattgcttgaacctgggaggcggaggttgcagtgagcggagatcactccattgcactccagcctgggtgacagaccaagactctgtctcaaaaaaaaaaaaaaaaaaaaagattccatctctacaaaaaaatttttaaccagcctggccaacatggcaaaaccccatctctactaaaaatgcaaaaattagccaggcatggtggcgggtgcctataattccagctacttgggaggctgaggcaggagaattgtttgaacccgggaggtggagttcttaaaaccacagtaatctattctcttatggttctggaagctggaagtctaaagtcaaactgtcagcagagctgtgctgcctccagaggctccaagggaggaccctttcttgcctcctccagcttctaggggtccaagctttccttggcttttggccacatcactccagtccctgcctccctcttcctcttcacatggacttcttccctctgtgtctgcatcattcatctcaatcctgtctcctcctttttttttttttttttttttttttttttgagacaggctcttcttgctctgttgcccaggctggagggtagtggcgccatcttggctcaagttaattggcgtcatctcagctcactgtaacccccacctcccaggatcaagcgattctcgtgtctcagcctcccgagtagctgggatcacaggtgccttgccaccatgcccagctaatttttgtatttttagtagagatggggttttttcaccatgttggccaggctgcttaaaaatttttttttgtagagatggaatctccctgtattgcccaggctagtcttgaactcctgggctcaagcagtcctctcaccttgacctcccaaagtgctgggaccataggtgtgagccattacacctgaccctgtcttctgtttttagaaggacaccatccatatggaactaggtcccacgctaatgacctcatcttaactaattacatctccaaagaccctattttccaaataaggtcacattcaaaagttggtggtatggggttaagatatggacatattgtcttatcagcagctctatcagacccatcccttgccaatgacatctccaaggggctggccagagactcaaatgaatgaggcacatcccctgcctcaaacctagtccctgtccaggtcagggagacagacacatccctctgaggctggggtccaggtagagaatgttcagataagagcatttgtgccaggtgcggtggctcccacctgtaattccaacactttgggaggccgaggtggaggatcatttgagaccaggagttaaagaccagcctgggcaccatagtgagaccccatctctacaaaaaaaaaaaaaaaaaaaaaaaaaaactagctgggcacagtggcatgcacctatagtcccagctactcaggaggctgaggcaggaggatcacttgagcccagagagtcaaggctacagtgagttgtgattgtaccattgcattctagcctgggcaacagagcaagaccccagctctaaaaattaaaaaaaaaaaaaaaaaagtagagacggcagtaggaggagctacgtcatcacaaccaggaaactcccagggtcagatcaggggaagcccgtgaggcaaggcctggcccagcaggctcgagtctctttaaaatcttgctatttttgctcatcatggaattttttttttctttttgcacattgatttagattttctgaaatactgtgctaaaatattacctatctcaatgactgagggttttgggggacactcaaggcagatgccttacactccataccctctttacagtcctggaaatgatatgtttcatagctatagactctcccctccttggccccgttaacgcggagcccccgatgttgggatctgggcatgcgttccgctgcctgtattttcaaaagtggggccgggctcaggcagcatttgccaaaccaacaacatcatttccctcctgggaggcagactcagtcaggtacaaggagtcccttattctgcccccacaatctccccctccccggagcacaacagagccctgcttcatcctcctctcctagcctcttcttccaactgtggagcaggagaaggaccccctgtccaaggtatggcattgaggtacaaatggctccaagaccagaagtcacccaggcccaggattattcttaggagctgcctacgatgggtaacagatccagacctcccaggggacagactttgcagacgccaccaagcctggtcagcgacctctctccaagccccctagaaaacagccatgtggggtcgaagagagtgagccacccagactcaggcactgggctactcaatgttaattctgcagccctggctgggcgcggtggctcacgcctataatcctagtcgtttgggaggctgaggcaggaggatcacttgaggccaggagttcaagaccagcctgggtaacatagcaagtccccttctcttaagaaaaagaaaaacattgtactatagtcccagctactcaggaagctgaggcaggaagatcccttgagcccaggaggtcaaggccacagtgagctgtgatcgtaccactacactatagcctgggcaacagagtgagaccctgtctccaaagaaacaaatatttttctgttttaaaaatcctgaagccttgagagcgtcacttcaccctcagcctccttgtaccaggctgcagctatgccagctgacgcagagagcagagtcccagccctccaccagcgtgttcagcatgaggcaggcaggcacacccagatagcagcgtcccagccctctgccagcatgttcggcatgaggcaggcaggcgcactgtcattccttcctttcttcactccttcacccacccctctgtgcacagagccctgtgccacttcactgctctgcccaccccatgcacccacccacctcgtgcaccaggggtctgcaagataaaatacacagcaggtaaatcagccgctgttcatgcctgcaaaggttccatgttctgttcccagcttcccccacgccacgagccagaccctgctggccaagttcaaacagcaacatgaggacaataagtacttcctgggcaccccggtcatggagccagctttcatcatccagcacttcgcagggaaggtgaaatatcagatcaaggtaggtgtctgcccatcaccactggtggaagcctgagggaagccacagtcagcccagaagcccatgtgggaggatcctcctgtgggcgaggttccagggtgctcagaacccaccgcgaatccccggctccaatgtccaaggcgccatagttcaagaactgccatttgcacttaggatgggccccaccccaccgtcagcccttcctgcgccagcccggggtctttggtaggcgccggtgagtgactatccccgagtgaccgcccacatccatcccccaccaggacttccgggagaagaacatggactacatgcggccagacatcgtggccctgctgcggggcagtgacagctcctacgtgcgggagctcatcggcatggaccccgtggccgtgttccgctgggccgtgctccgggctgctatccgggccatggcagtgcttcgggaggccggacgcctgcgggccgagagggccgaaaaggctgcaggtgggagctggggcgtgaacccacaaaagcgtcactgtcgagaggggggcacatcctgagttcatcttaaagtgaacacttcagtggcatttagtacattcattatgttgtgcaaacgccacctgtctacctgaagtgttcctgtcaccctgaacagaaactcgacctgcgtgtgtaatttaacctcagggcatgctatcagcaactccatcaggcgtctcctttgcaaatgatgccctctgatcccactggccctgggagtttgctgattgtgataatgtagctcttcctagtgttttgcctcttgtttctctctctctgtcttgctctttttttttttttttttttttagagacagggtctctctctctctctctcttgcccaggctctagtgtaatgacgcaatctcggctcactgcaacctctgcctcttgggttcaagcgattctcctgcttcaccctcccaagtagctgggactacaggttaccgccaccacataggctaatttttgtatttttagtagagacggggtttcgccctgttggccaggctggtctcgaactcctgacctcaagtgatccgcccgcctctgactcatgaaatgctgggattgcaggtgtgagtcaccatgcccagccccagcctcttctcttaactgagcattctctactgggaacccagcctcaaagggacatttctgttcccccgtcctagacagagatggtttgaggcagggggtgtgcctgatccactcaagacttgggccagccctatagagttgctgatagaaggatggcagaaagctatgtcctcatttttcccagaggcaacctgaggcctgcatggttgagtggctcacccaggtctaagggctccaaccttccgtcctcagcttcagtttcagttatcagctgtggcttctgtctccggaaggggcttcatgaaaaggaggaaggataaagctttcctgagaaataggaaatagtgctctgttttggggatccaaaacttcacagttacccacccaactttgccccaaacttgagtgatgagctgcttttttttttttttttttttttttttgagacggagtcttgctctgtcgcccaggctggagtgcagtggcgcgatctcggctactgcaggccccgcctcccgggttcacgccattctcctgcctcagcctcctaagtagctgcgactacaggcacccgccaccacgcctggctaattgttttgtattttttagtagagatagggtttcaccatgttagccaggatggtctcgatctcctgacctcacgatccgtctggctcggcctcccagagtgctgggattacaggcgtgagccaccacgcctggccaatgagctgctttttaagatcggtctgccaggtgcagtggctcaagcctgaaatcccagcactttgggaggctgacgcagacgatcgcttgaggtcgggttcaagagcagcctgaccaacatggtgaaagcccatctctactaaaaatgcaaatattagccaggcatggtagtgcatgcctgtggtcccagctaccacagggaggctgaggtaggagaatcgcttgaacccgggaggcggaggttgcagtgagccaagatcatgccagtgcacttcagcctggatgacagagcaagactccgtctcagaaaataaataaataggccggacacggtggctcacgtctgtaatcccaacacttcgggagaccgaggtgggtggaccacgaggtcaggcggttgagaccagcctggccaacatagtgaaaccccgtctctagtaaaaatacaaaaaattagccaggtgcagtggcaggcacctatagtcccagctactcaggaggccgaggcaggagaatcacttaaaccggggaggcagaggttgcagtgagccaagatcgcgccactgcactccagcccaggcgacagtgcaagactctgtctcaaaaaaataaataaataaataataaattaattaattaattaattaaaagatgggtcaaagtgtctgggtacaatggtgcacaccggtagtcctagcactttaggaggccaagacagctctcttgaggccagctatttgagaccagcctgggccacatagtgagaccccatctctccagaaaagttgaaacttagtcatgtgtgtcagcatgtgcctgtagccccagctacttgggaggctgaagtaggaggattgcttgagcccaggagttggaggttacacgagctgtgatcgcaccactgcactcggcctaggcaatgcagcaagaccctgttggtaaaaaattaaaaaaaaaaaaaaaaaggttggggggtgttgcagagactcatgcctataatcccaggattttgggaggccaaggtgggcagatcacctgaggtcaggagttcaagaccagcctggccaatatggcaaaaccccgtctctactaaaaatacaaaaattagctgggcacagtggcctgtagtcctagctactcaggaggcggaggcaggagaatcccttgaactcaggaggcagaagttgcagtgggccgagatcgcgccactgtgctccagcctgggtgacagagcaagactccatctcaaataaataaataaaatgggttaaaataattgcagcctccataggaggccatccccaccaccatccactctgtgtctccggcaggtatgagcagccctggtgcccaaagtcacccagaagagctgccaagaggagccagcaccccttcggaaaaactttaccggtgagcaagaccctgatttgcccaaactgaaatcattaggtggcagcagcattgtttcaaacaacttagggaatgctacattcttttttttttttttttttttcttttgagatggaatttcgctcttgttgcccaggctggagtgcaatggcgcaatctcggctcaccccaacttccacctcccgggttcaagcgattctcctgcctcagcctcccgagtagctgggattacaggcatgcgccacgatgcccagctaattttgttttgttttgttttttgttggtttttgtttgtttgtttgtttttagacagagtcttgctctgttgcccaggctggagtgcagtggcgtgatctcggctcactgcaggctccgcctcgcaggttcatgccattctcctttctcagcctccggagtagctgggactacaggcacccgccaccacacccggctaatttcttttgtatttttttttaactagagacggggtttcaccgtgttggccaggatggtcttgatctcctgacctcgtgatccacccgcctcagcctcccaaagtgctgggattacaggcgtgagccactgcaccctgcctaattttgtatttttagtagagacggagttactccatgttagtcaggctggtcttgaactcctgaccttgggtgatccacctgcctcagcctcccaaagtgctgggattacaggcgtgagccaccagggaatgctacattctaaacccaggtcgaggttgctctgaataagtcactgagcttccatttgaaacagaaagacccagaaccaagcagcatttggtggctgcttttctggacacagaatagcaggccgtggtgcatcatgcgctttagggagatgggaggaggctcagtttacaaaggatccattttatggcctagggtgggcactgggaggtagagcccaagcatcgatggtggtgcggagagacgggcttgattgattggagagttcttcccccatcctgcctggagtggcccaaaagtagttctgccaagttacttcattcacagtcagaaacacatacactttgatattgcacatgagatgacacggggtcttttgtggaccctagcaatgaccaagggccctgcacgcacccaagcatgtgccagcaccagggtagaaaagtgagcaggctggccagacgtgatggtgcacgcctgtaatcccagcactttgggagaccaaggcgggcggatcacttgaggtcgggcgtttgagacccgcctggccaacatggtgaaacctcgtctctactaaaaatactaaaattagccaggcgtggtggcgagtacctgtagtcccagctactcgagaggctgaggcaggagaattgcttgaacctgggagatggaagttgcggtgagccaagatcgcaccactgcactccagcctgggtgacagagcaagactctgtctcaaaaaaaagtttttggaatcacctttttcacccaaaatgggacacaagtaaggagaatgcattcctctgttgtttttgtttgttggtttttttttttttttggtcccccaagttcccaacagctagaaacttccttctatttcattgtgtgggttgcatttttgttttgttttgttttgcttgagaccaggctattgtgcagtggtgtaatcacagctcactgcagcctcaacctcctgggctcaagcaatccccccacctcagcctcccaagtagctgggacaacaggcacacgccaccacgcctggcttattttttcttttataaagacagggtctgattatgttgcccaggctaatctcaaactcctggcctcaagccatcttcccacctcagcctcccaaagtgatgggactacaggcatgagccaccacacccagtcctcttttttttttttcttgcctccgttaccccaaagacaaagtgacttctgacctgcggtagcagaagcagcatccatctccccagggcctggccacagggctgcaggtcccgcccaaggagcatgttaagtttatacagattctccctttcagctgctcaatgctagatttctcatttgacggctctgaggagttcgatattaacgcttttgaggacatcattgctttctatgaaagcaagaagtaagtgcagaaagggcctttgatcccgaggccagcaaggcaccaaggggagccatcttccccaggtgctcagtgctgcgtccaggacacagacagagaggactggccgttcagggaatgccagggcctgcaagggccactcctgccagatttgcagatttagccaggtcggcagggctgcgggtgggccaaagtcatgggcctcattccaagccgtggccgctgcactgaccaccctgggtgtgaaggccactcgcatatagaggtgacaggcgacccctctgttgcctttgctctgcctccctggagggctggggagagcaggtaagtggggccatgggggcacttggcatggtgcatggagcacaggggctggggtcgggtccttccaggccacctgccgagagctaaaacatgtgctttgaacgactgccagcaggatgcggtagcacgcacctgcaatcccagcgctttgggaggccaaagccggaggatcacttgaggccaggagtttgaaaccagcctgggcaacatagcaagaccacacgcctacaagaaaaaataaataaaatgtctggaataaggaattcaaaaaaaaaaaaaaagcaggaaaaaccagatcctcatttctagaagttctgagttctgtcaaaaacatttgtcatttagacattcctcactaatatttagtttgaaagcatccagttttcatctctaaggcattctaattcacacacggtatcagtgccaaagtttgcacctccgcgtgcgtgctcaagcctaagcccacagccatcaaacaaaatgaagcgagtaaggttgagtgctttgagggtaattatccccttaaactagggtttctctggccgggcgcagtggctcacccctgtaatcccagcacttgggggaggcatacgtgggcaggtcacttgaggatgggaattcaagaccagcctggccaacatggtgaaaccctgtgtctactaaaaatacaaaaattagccaggcgtggtgtgcacctgtaatcctagctactggggaggctgaggcaggagaatcacttgaacctgggaggcggggtttgcagtgagccgagatcacaccactgcactccagcctgggcaacagagcaagactctgtaaaaaaaaaaaaaaaaaaaaactagggtttctcaacctcagcactgtgccagatcattctctggggtgggcacccgtcctgtagactgtagggtgttgagcagcatccctggcctccacccaccagatgccaggagagcacccccacccccaagtcatggcaaccacaaatgtctgcagacattggcagatgtcccctgatggggatggtaccgccccggttgagaactgctgtgttcaaactgtggctcttgtattcaaattaattcctccaaaggccttaatgaagccaacaaggagattgacatctggccacaaaatcatggagagagactaatttgctcctcccacagagaccctccctagggtcttttttctgagtcgccccaactgatttttttttttttttttttttttttagacagagtctcactctgttgcccaggctggagtgcagtggtgcgatctcggctcactacaacctctgcctcccaggttcaagcgattgtcgtgcctcagcctccggagtgactgggactacaggcatgcgccaccatgcccagctaatttttgtgtgtttagtagagacggggtttcaccatgttggccaggctggtcttgaactccctacctcaggtgatctgccctgctcagcctccgaaagtgctgggattacaggcatgagccaccgcgcccagcctgtcatggaatttaaaaaataaataggctgagcagggtgatgcatgtctgtaatcccagctactcaggaggctgaggcaggagaatcgcttgaacctggaaagtggaggttgcagtgagctgagatcgcaccactgcactccagcctgggcaacagagcaagacactgtttccaaaaaaaaataaaataaaaataaaaataaatttaaaactaaataaatatccccagccaggcgcggtggctcacacctgtaatcccagcactttggaaggctgaggtgggccgatcacaaggtcaggagttcaagacctccctgaccaacatgatgaaaccccatctctactaaaaatacaaaaattagccgggcatggtggtgcacgcctgtaatcctagctatttaggaggctgaggcaggagaattgcttgaacccaggaggcagaggttgcagtgagctgagattgcgccattgtactccagcctgggcgacagagtgagactccgtctcaataaataaataaataaataaatatccccaaaggctcttaaatatgagaactttttcagtgatccaaatgaaaaggatcgaataaagtggaatgaccagatggaaataatttttttttttttttttttttttttgagacagagtctcgctctgtctcccaggctggagtgcaatggatggcactatctcagctcactgcaacctctgcctcccgggttcaagcaattctgcctcagcctcccacgtagctgggattacaggtgccctccaccatgcccagctaactttttgtatttttagcagagatgagtttcgccatgttggccaggctggtctcgaactcctgacctcaggtgatccacccgcctcggcctctcaaagtgctgggattacaggtgtgagccaccgcacccagctggaaatgatgtattgaaaaggatcaatgatctgtgttgccaagtccaatttgcctcaaagccctgccccgctccagggcttggggaggctggcccagtccccatttctggcaaaagagagaggggcagcattgagcacagtgtctttcccccagctgcatgttttggcttcagtggcctggggatggtcccaatggcgctgggaaccccgaggtggcaggcctgcttctaactccatcttctttctgtcactgcgccccctccacccctcccctcagcgatttgcataaccaaatgatcaagagcatcaaaggattgccctggcagggcgaggacccccgtagccttctccagtccctcagtcggctccagaaaccccgcgccttcatcctgtgagtcccccaccaaggccctgcttacaagtgcgacaaccgcctcccactactcctgcgaccccggcggggcctgcagtcttcctaatttgcatcggccactaaaaccacagtgctgtctcatggcccacccccagccatcactaaatgccaatcaataacacccctggcctctgtctgcactgtggcccaggcacagccggcttcccagcacacggggcagcttcccaggagcactccttcttcgaggcatctaattttccacccgcaaacgtgccatcctccgtctcctccccgtgcctatctggcttgcagagcaaagcttgctcccgcctttgccactgtgagtttgcagagaagccatctgcagcagggcatgcgatttcccagagagggtggccctgatctctgcaggtggccacataagccagtcaggagagcccagaaggtgcataaaccggtttgggatcccgactgttagcacactgtgggattgagtagtctctgctttcagcctgcaaatggggtaatgactctcatgcttccattatgctgacccagcaccaggcaggcagcagcctcagctgacaagacatccacctgcggtcaccacatctcgccttttagtggccattggggtgtgggctggctgagagcaaagcttgcacctgcatgggagccaatgagagccagtttctttctttctttctttctttcgttcgttctttatttcgttctttcgttctttttttgagacggagtttcactcttgttgcccaggctggagtgcaatggtatgatctcggctcactgcaacctctgcctcccgggttcaagcgattctcccacctcagcctcctgagtagctgggattgctaacacctgccactacttccagctaattttttgtatttttagtagagatggggtttcaccatgttggccaggctagtcttgaactcttgacctcaggtgatccgtctgtcttggcctcccaaagtgctgggattacaggcatgattcaccgcccttttttttttttttcttttttaagagatgggggtttcattctgttgcccaggctacagtgcagcagtgaaacgatcaccgctcacggcaggttcgaccttctgggctcaagcaatcctcctgcctcaacctccagagtagctggaactacaggtgcgcattaccacacctgtctaattttattgtttgtagaggtggaatcttgctatgttatagcccaggctgtcaggctggtctcaaactcctgggctcaagcgatcttcctgcctcagcctctcaaagcactgggattacaggcatgagccaccgcacccagtgggagcctgtttaaaacttctgttccttttttttttgaggcagagtctcactctgtcgccaggctggagtgcagtggctcaatcttggctcactgcaacctccacctcccgggttcaagtgattctcctgcctcagcctcccaagtagctgggattacaggtgtgcaccaccacacccgactaatttttttctgtttttagtagagatggggtttcaccatgttggccaggctggtcttgaactcctgacctcaaatgatccgcccacctcggcctcaaacttttgtccttgttgtgccttattttaccccacagggattcaggtgaaactgaatgcaaccacggatggctaggcatctcacagatctacaagttaccatctccttagccggtcttcaaaaggcaccaggccttttgaataaataaatatatttacttatttatttattttcccccttggtctgcaagattccataaggtgtctgagaacacaggagctatccccttccttacctcggccaaaagagcagctttgggttttggggggggttttgagacagagtctctctctgtcacccaggttggagtgcagtggcacgatctcggctcactgcaacctccgcctcctgggttgaagcagttctcctgcctcagtctcttgagtagctgggattacaggcacccgccaccacacctggctaatttttgtatttttagtagagacagggtttcaccatgttggccaggctggccttgaactcctgacctcaggtgatccgctcacctcagcctcccaaagtgctgggattacaggcgtgagccactgcgcctggccagctttggttttcttctttcccaccagcatgatcctgaaaggagctcccacccaggccccattttggttattttgcagggcaagtccctgccctgccagcagagggttccagaagggcctctgtgggcctgcttggcatctaccagcacatggcaaagacagcctggtcacctggtcaccaccaggactgctcaggctccctccgccccactcggcatcctgctgtgatctgggggatatgtcagttcctccatagcaagccccgctggatgcacgtcccaccctgtagattcctagccagcccctcctacttctcagacatccgaatggcccccagactaaacactttactcagctttggggcagccaccagcagagtccgggtgccgccaacccagggaaactggtgtccacagacagtggctgaggcacgccacggtgtgcagcgtggagaggtggcggtggccttgttgcacttgcgccttctcactctctcccctctctctgtgtctctcagtctaacccgccaggcgtggcttgctgaactaacccaaatcccgacactgtgttccttttgttcacaaaaccatttttaatattttgacaggaaaagtaaaggtatcaaacaaaagcagatcattccaaaggtaaaaaaaaaaacacaccccgcgcgacacgttccaagatatcttgcttctctgcccgtcttgagagctttcacttctgcaacttcatttcctcctccttcccactatctccccctccctccaagaaaaaaaaaatgttctcgtgttgagatgatttagagctgtctctttatgggtttcccagaagcagggtctgagatggggtatttgcacacacagcggcttatggaagagggcttacgtgagaaggcagagagaaggggtgagggaggaagctaggggcgtaagcatagctgaagtctggcctcagcctggtcccatggggagctctagtgggttcatagcaccacagagctcatcctgccccaacgtaatgggacccttccgtttaacacccccatcttcagtccctggctactgggctgcttccagacaggacagagaacctcccaagcgctctgtctcgtttccacatacaagtgcagcaatttaagaaatttgcaagaagagtaagaatagccttgcagtctagttagcagatgggagagggctaattcctcttgtcagctgatagaactggctgacacatgatggtggcctgtccgatgagctcatgcggatggcacagaaaggacctggcccttcttgactcaagtaatgtaaactgtaggagctatgcagaggagagggacggccaggttcagtagcactggcttcctctctaacccagaggaagaggaaatggggcagccactcaggctgtgaaagaggctgtcatcagccctcccggaaccagcgctgtgtgcaaggtgcaaacccacctcattccactgggcccacatcaatagtgtggtcctgagaccaaacctaagagctgctgcccgggcactcgctgcggggacgctgttctgccctggcttcggggacacctgtgatgcctccccgtgcccgtgtgggctgtgggagggcaggccggaccccatgtgtctgtcctagaacctactggactccaagtccctgaaactcatcatcagcatgactctgcacgaccgcaccaccaagtccctactgcacctgcacaagaagaaaaagccaccaagcatcagcgcccagttccaggtaggtggagcaggagaggcagaaggtggcggtcagctcagcctcaggcttgtgtagcttcacccgacaccgagcacagcccgtctctagtaaaaatacaaaaattggccgggcgcggtggctcaagcctgtaatcccagcactttgggaggccgaggcgggcggatcacgaggtcaggagattgagaccatccttgctaacacggtgaaaccccacctctactaaaaatacaaaaattagccgggcgtagtggcgggtgcctgtagtcccagctactcgggaggctgaggcaagagaatggcatgaacccgggaggcggagcttgcagtgagccgagatggcgccactgcactccagcctgggcgacagagcaagactccatctcaaaaaaaaaaaaaaaagatacaaaaattagctgggcatggtgggcacctgtaatctcagctccttgggaggctgaggcaggagaattgcttgaacctgggaggcggaggctgtagtgagccaagatcacgccattgcactccagcttgggcaacaagagcaagactgcgtctcaaaaaaaaaaaaacaaaacaaaacaaaaaaaacactacatccgtggtcccttctgaggttgacacatgtttcaaatctccagaaagcgtttgtctggtcctccccagccccagccttccacctgaggcaaaaacaagcactggtggccctgggaccatggggaccacataactccctcgagggtttccagggatagcgcaggcttgggtcagaacgtccagctggaacctcctgtgtcccaccaccagggacccacatctgtgcagaccccatccaccccacactgatgctagagtgtcccaggtctgctcccacagaacagcggctgtcagggtccctgattcaacccaaatgctttctctttcccttaacagacatcccttaacaagctcttggaggcactggggaaggcggagcccttctttatccgctgcatccgttccaatgctgaaaaggtgagtttctctaaggtgtttgggaggagaaggcccatgccggactcttaggggtgtcggtgtccctgcatccagccccagcctccacgcagtatgggggacggtgcagcagtccatccagaggcagccggggatggagaattagcagtgaggatggtccaagtggccatttaagagcagggacatcatctggaacatggagaggcccagagaaggtttgattagggagcgacaggtcaggggtgcttttcagatacatcccaaagagtagccggtgcaaggagtctaccagaaggcagaggctgagattacatagcagagtctcagaggcacacacagcccgctgctcacattacaagtttctagagagacccttggagcccccgtgggaccaccagcaggggctccaggctcagcactggcacaggcttcctttaccccagaggtccactccatccctgggaggacagctcggggactttgccagggactgagcaggagtgtgggctcccagacaaatgtgagcacacagccaggcaggaacctcccgccaactgtacctggggagatgctccgtagtgcaccttctctgctcgtgggctgtgccagcagatgattctctgtgataaaacccattttgtgcactggagggtggcagcatccctggcctccacatccacccccagtcatgacaaccctcctcattctttcccgtttgcctttgtttgtttttgtttgtttgtttttgagacagaatctccctctgtcacccaggctggagtacagtggtgcgatctcggctcactgcagcctcgacctcccaggttcaagccatcctcctggctcaccctcccaaatagctgggattacaggtgcccaccacgccaagctaatttttgtatttttagtagagacggggtttcaccatgttggccaggctggtcttgaactcctgacttcaagtgatccacccatttcagcctcccaaagtgctgggattacaagcgtaagccaccgcgcccagcaccgtttgtctttatagcaacaccatgccttatcccttactgcccaccagagtgaagtccagacccctaagctccaggcttaaagcccactgaggcagctgcatttccagcctcttctctcccctggcaggaagcatctccctgtgtccccatcagacccttggcttcttccttctcctgtgggcctccacccagctgttctctgcctgttccctcctcaggacacagcccagcatctcctctctcctgggacacctcccatggggtgctgggctttgtccgccccatcacctgtgtgtgactcctgaccccagaccaagctctcctctccaccgaatccccagcacttaccccagtgcctggcagagaacaggcccggaacactgggctttgtccgccccatcacctgtgtgtggctcctgcccccagaccaagctctcctctccaccgaattcccagcacttaccccagtgcctgccacagagaacaagcccagaacagatttgcatttgggttctttttttttttcttttcttttttctttcttttttttttaaaaaataaatttaaatgactagagatggagtctcactatgttgcccaggctggtctcgaactcctggcctcaactgatcctcccatcttggcctcattccagaaagagtgtctggagcaaggacggaccccttgtccaggtgctcctggctgccgtgccgtagaacactcccaggtcggctagccagcacccacgtgtgcaccctgaccatgtctgtgttcggcatcccaagaggcagtggtcgcatggggaagtgccctcatctcacagttcccaggcctgagccagcaacagacttgggcatcctgtcaggtcaaggccacctgcctgatgtctcgcattcccatttcagaaagagctgtgctttgacgacgagctggtcctgcagcagctgcgctacaccggcatgctggagaccgtgcgcatccggaggtcagggtacagcgccaagtacacgttccaggtaggccacaagcacatatacctggacacacctgttccgtggcaaaggcaatcaccctcttccaaagagagctccttgctggagtgtaaactcagcaggttggccaggtgcagtggctcacgcctgtaatcccagcaccttgggaggctgaggcaggcggatcacctgaggtcaagagttcaagaccagcctgaccaacatggtgaaaccccatctctactaaaaatacaaaaattagccgggtgtggcagcagctgcctgtattcctagctactgaggaggctgaggcaggaggatcccttgaatccaggaggcagaggttgcagtgagccaagattgagccactgcactccagcctgggcaacagagcaagactccatctcaaaaaaaaaaaaaaaaaaaaaagaagaaacccctgcctcatgccaagagctagtacctgtgtcaccctgagcccaaagccagaggtgacagcgcctggttccctttcacgctttcccttcatagccccagggactagaatgtaatgtgcctcttttctcatccactgaatagaaatagtgtctttctaatcctatgcggataagaaaagcaaaattataaaaaatgcagaaatgctggtgtattttaccagtgcttggcccttaaatatttgaaataataatttactcaaaagaaatgttctgggcgggtgtagtggcacacgcctgtaatcccaacactttgggaggccaatgcaggaggatcaattgagcctaggagtttgagaccagcctggacaacatagtgagaccccatctctgcaaaaaatttaaaaatcagctgggcacagtggctcacacctataattccagcattttgggaggccaaggcaggtggatcacttgagatcaggagttcgttaccagcctgaccaacatggtgaaaccccgtctctactaaaaatacaaaaaaaaaaaaaaaaaattagccaggcatggtggggcacacctgtaacctcagctacttgggaggctgaggcaggagaattgcttgaacccgggagatggaggttgcaataagccgagatcacgccattgcactgcagcctggccaacaagagcaaaactctgcctcaaaaaaaaaaaaaaattagccagacaaggtggtatgcacctgtggtcccagctactcaggaggctgaggtgagaagatcacttgaacccaagtagtttgaggctacagtgagttatgactgagccactgcattccagcctggatggcagagcaagaccctgtcttaaaacaaaacaaaacaaaacaaaactagaggcccagtgtggtggctcatgcctgtaattagcactttgggagggcaaggcaggcagattgcttgagctcaggagcttaaaatcagtctaggcaacatggtgaaaccccgtctccacataaaaatacaaaagccaggcgtgctggcatgcaatgtacttccagctacttgcggggctgaggcaggaggattgcttgagtctgggaggttgaaggtgcagtaagccatgtttgcaccactgcactccagcctgggcaagactccgtctcaaaaaaaaacatgttcctccagctacaatctaactcccccacaagtcctagactgtaagccccattgcaagggtgactgtggttcccagccacctcgaccatctaaaagatctaggaccttgtatctgcagtggtctttcttaagattacagactgttggctgggcgcagtggctcatgcttgtaatcccagcactttgggagcctgaggcgggcggatcacgaggtcaggagatcgagaccatcctggctaccacggtgaaaccccgtctctactaaaaaaaatttaaaaattagccgggagaggtggcgggtgcctgtagtcccagctactcgggaggctgaggcaggagaatggtgtgaacccgggaggaggagcttgcagtgagccaagattgtgccactgcagcccagcctgggcggcaaaacaagactccgtctcaaaaaaaaaaaaaaaaaagattacagactgttgacctggcatggtggctcacacctgcaatcctagcactttgggtcacgtgacccatttaccactgcacccagctgagaacccatttctttggttttttgtgtgtgtgatgggggtggtgcagagccttgctctgtcgcccaggctggagtacagtggtgtgatctcggctcactccaacctccatctcccgggttcaagtgattctccttcctcagcctctccagtacatggggttacaggcgcctgccaccattcctggctaattttggtagagacagggttttgccatgttggccaggctggtctcattggttgagctcaggagttcgataccagccttggcaacatggcaaaaccctgtccctacaaaaatatttttttaattagctgggcatggtggctacaggactatgtgccgtagtcccagcttccagggagactgaggcaggaggctcacttgagcccaggaggtcaaggctgcagtgagctgagatcacaccactgcactccagcctgggtaacaaagtgagaccccgtctcaaaaaaaaaaaaaaacagactatttcttttttttttcttaagacggagtctctctctgtcgcccaggctggattacaatggcgcaatcttggctcactgcaacctccgcctcccaggttcaagtgattctcctgcctcagcctcccaagtagctgggactacaggtgtctgccaccatgcccggctaagtagagatggggtttcaccatgttggccaagctggtctcgaactcctgacctcaggtgatccacacacctcggcctcccaaagtgctgggagtacaggtgtgagccaccacacccggcccagactatttctgaaagcctgaaattttagatttgtcattaccattcctgtcaaacccagcttcaccttaaccagggtcaccagatctctgtctcctcatcgctggccagaacactcacctagattttcctttctccacccaaataacctaggatttcaccgagcagttccaggtgctcctgcccaaggatgcccagccctgcagggaggtcatctccaccctcctggagaaaatgaagatagacaagaggaactaccagatcgggaagaccaaggtcagcgctcctgcccctcggggcactacaaacccacaccctgccttccaccgcacaccgtgtctccccaggcccccagggccactctctgaaacatacagggctctgtctaggaaatgcatttctcgggacccagcagagcactgcacctaagggataggggccgccctggctgagccccacctgctgttcttcagcagggctcagcgactccctccgcgtcacctgtttattgctgcctcacaggtaggaaagggacgatcgtgctaactggcaggatttaggagatggtcagtcccctttacggtatgaggcaggaggtggcctgcacttgtcctccctttcagagactgtctcccatctctgggcatgtgtttgcctcttgctatgggagcattactcagccacccttgtttaacaagcgccaaggtcagtccccctgaaggcctcacctggtgtaaaaaattcccttccagccaagcgaggtggcatgcacgcagagtcccagctacttgaaaggctgaggtgggaggatcccttgagcccaggagtttgagaccagcctgggaaacatagcgagaccccatctctatacaatatttaaaaattagccaagcgtggtggcatgcacctgtggtctcaactgcttggcaggctgaggcaggagtttgagactgcagtgagccctgattgcaccactgcacttcagcctgggtgaccgagcgagatctcatttcttttttcttttttgtttttatttttgagacagagtcttgctctgttgcccagacaggtggtgtgatctcagctcactgcaacctccgtctcccaggttcaactggttctcctgcctcagcctccaagcagctgggattacaggtgcccgccaccacacctgactaatttttgtatttttagtagagacagggttttattacaggcacacacctgtagtcccagctactcgggaggcttaggcagaagaatcgcttgaaaccgggaggcggaggttgcagtgagctgagatcgggccactgcactccagcctggtgagactccatctcaaaaaaaaaaaaaaaaagggggggccacagccaggtgcagtggctcatgcctgtaatcccagcatttttgggaggccaaggcgggcagatcacttgaggttgggagttcgagaccagcctggccaacatggtgaaaccctgtctgtactaaaaatacaaaaattagccaggcctggtgatgggcacctgtagtcccagctactcgggaggctgaggcaggagaatcacttcaacccagtaggcggaggttgcagtgagccgagatcatgccactgcactccagcctgggcgacagagtgagactccatctcaaaaaaataataaataaataaataaataaagccctggttggtcagcacaccagcctaggtctcactctggagtgggctatgcagacctcccaggcacagagatggtgtcaggggcagtgcagctgaccccacctgaccccgtgcccaccaggtcttcctgaaggagacggagcggcaagccctgcaggagacgctgcaccgggaggtggtgcggaaaatcctgctgctgcagagctggttccggatggtgctggagcgtcggcacttcctgcagatgaagcgggccgccgtcaccatccaggcctgctggcggtcctaccgggtccggagggcgctggagaggacgcaggctgccgtgtacctccaggcctcatggaggggctactggcagcggaagctctaccggcaccagaaacagagcatcatccgcctgcagagcctgtgtcgggggcacctgcagcgcaagaggtgagcagagccgggccacgctcctcggaatattccagaagccaaaaaggtcactcaccaaattgctgcccgtgatataccatctggcctgtggcactaaggggatgtcattctggacacagggaaaggctggtgggaaaccagatgcctaggcactcatgggctgcagagaagtgctccaaggctggcaggcagcactcagggacaaagccctgctttgccattggctgcacccattctctgcccagggactcccctgtacctggatcggtcagggaacacctggattcagggttggaggggctgcctggaccagcccaacactcacatggagctggggcatccaccgggcacagagaagcccccaggaggatatcagcagctcccgtcccagcacccacagctccgagcccagcccctccccgacctaggcaccctgttcacctctcccctgcccacacagacccagctctgccacaagtcaggtcccagctcccggagcaggccctacccacacatgcaaaagcctcctaggccaggtgcaatggctcatgcctgtaatcccaacactttgggaggcctagatgggaagatcgcttgagcacaggagttcaagaccagcctggccaatatagcaagatgccatctctacacaaaattaaagacttagccaggtgtggtggtacacacctgtagtcccagctattcaggaagctgaggtgggaggatcacctgggcctgggatgtcgaggctgcagtgagctatgatcacaccactgcactccagcctaagtgacagagccagacactgtctctaaaagcaaaacaggctgggcatagtggctcacacctgtaaggccagcactttgggaggccaaggcaggcagatcacatgaggccaggagttggagaccagcctagccaacatggcaaaaccccatcttacgaaaaatacaaaaatttgccgggcttggtggtgcatgtctataatctcagttactagggaggctgagacacaagaatcacttgaacccgggaggcagaggtcgcagcaagccaagatcgtgccactgcattccagcctggacaacagagcgagactctgtctcaaaaataaaataaaataaaataaaataaaagcaaaacaaaaagcctcctagaaaaagacccaagggaaagcccacagtggaccccaaaggagtttgaggcttcttaatagaacccacccaccacagccccaacaagggtcctctcccctaacaaggcagccaggcagacgcagggcaggggtatctgtgacactgagggggcaccaccctcagcctcctttcctgatcgaggagattcctgctttccagaagcatctctcagggccactgggcacaggcgaagccccgtctgcagcccgcaggctgggggtcccatcggaactcagtgggaggtggagggagtgtttgtttctgaaccagctgtctgctttttcctcactccagcttcagccagatgatctcggagaagcagaaggcagaagagaaggagagggaagccctggaagccgcaagagcaggtgctgaggagggcggacagggtcaggcggctggagggcagcaggtagctgagcaggggccggagccagcggaggatggcgggcacctggcatcggagcctgaggtgcagccaagtgacaggtcccccctagagcactcctcacctgagaaggaggccccaagcccagagaagactctcccaccccagaaaaccgtggcggctgaaagtcacgagaaagtccccagcagccgggagaagcgtgagtcgcgtcggcaaagagggctggagcacgtcaagttccagaacaaacacatccagtcctgcaaggaggagagtgccctcagagaaccttccagaagggtcacccaggagcaaggggtgagtctcctggaagacaaaaaggagagcagagaagatgaaacccttctagtcgtagagacggaggctgagaacacatctcaaaagcagcccacagagcaaccccaggccatggcagttggcaaggtctctgaagaaactgagaagacgctgcccagtgggagccccaggcctggccagttggagcggccgaccagcctggccctggacagcagggtcagcccaccggcccctggcagcgcccccgagacccccgaggacaagagcaaaccatgtggcagcccaagggttcaggaaaagcccgacagccccggaggctccacgcagatccagcggtacctggacgccgagcggctggccagcgccgtggaactgtggcggggcaagaagctggtggccgccgccagccctagtgccatgctcagccagtccctggacctcagcgacagacaccgggccacaggggccgccctcacgcccacagagtaagccccacaccctcttttgtctgagcaccagggtccaggccaggtgggcaaggccaggggcagtgccacacatcctggaaacacatgtgtaatcatgcccagtgggtgtgcgggaggcctgagggaggaggacgagcaggacatgctaaagaccaagtgaagacaaggcagccagccagggcccaggctgggacctggagccttgaggggtccccagaaggagctgtgctcacacagaaaggccccggccttgagagaggtggctcctcaggtcaaggtccctgctgcccagaaatcttgggccttggtttctaattggtgaacaggactaactgcactcctcggggttaaaggagcaggggcttgctctgcctgagccttagtaagccaagtgtcagtgacttggaatctccagctccctcttccagagggcctgcaggaccaaaggaaagaaatcagggaggagacaggccttccctgcagcaggcctgctcagcctcccactgctcgtattgggggccagatcattctctgcggtgggggctgtcctgtgtatcataagatgttgagcagcatccctggcctccacttaccacatgccaggagtattatcgatagatgatggatggagggagggagggagagagagagagagggaaggatgtgtgggtgggtgggtgggtgggtggatggatggaagatagagatgatggaaggatggatggaaggaagatagagatgatggagggatggatggatggaaaatgatagaggtgatgaatggaagacagatatagatgatggatggatggaagatacacatgatggatgaagggatggatagatagaagacaggtagtaatgatggatagaggcatggatggatggatgatacagatgatggggagatggatggatagaagatgggtagaaattaggctgggcgcgatggctcatgcctgtaatcccagcattttgggaggccaagagtttgagaggagttcgagaccagcctggccaacatagtgaaaccctgtctctactaaaaatacaaaaattagctgggcgtggtggcgcatgcttgtaatcccagctacttgggaggctgagacaggagaatcgcttgaacctgggaggcagaggttgcagtgagccgagatcaagtcactgcactccagcctggatgacagagatgagactccgtctcaaaaaaaaaaaaaaagtagagattatggatagaaggaagatagatgccgacgatagatggatggaaggaagataggtaggtagagacaatgaatggagggatggaagataggtagagatgatggatggctgggtgggtggatggatggatggatggacagacagaaggatgggtggatggctggaagatagagatggagagatggaaggaacatagagttgatggatggagggatggatagatgataggtagattatggatgggaggaagatagagatgatggagggacggatgggtagaagataggtagagccgggttcgggggctcacacctataatcccaacactttgagaggctgaggcgggtggatcacctgaggtcaggagtttgagaccatcctggccaacgtggcgaaaccccgtctctactaaaaataccaaaaattagctggatgtgttggcgcatgcctctaatcccagctactcgggaggctgaggcaggagaatcacttgaacctgggaggcagaggttgcagtgagccgagatcacaccattgcactccagcctgggcaacaagagcaaaactccgtctaaaaaaaaaaaaaagatagatagagatgacagatgaagagatggatggaaggcagataaagaggatggatgggtggaagatagagacaatgagtcaatgagtagaaggatggatggatggatagatagatgatagatagatagatagatagatagatagatagatagatagatacatagatagatagatgggcaggcaggcagggtctcttgggctaaggcaaggtttcctaccctccacactcaacatctggggctggctcactctctggggtggagaccattctctgtagggtattgagtagcatccctgccctccactcaccagaggccagaagtacccacccactcctttccccccacccaagtggtgacaaccaaaactgtctctagacattgccaagtgtcccctggcaggggcagaactgcccaagtgagaacccaagaaccactaagacaagaaaatgccactgactcactctagtcagtaaaagccatgtttctgtgatctcgcagggagaggcgcacctccttctccacgagcgacgtctccaagctcctcccgtccctggccaaggctcaggtaacaacaacacggcaaaaccccgtctccactaaaaatacaaaaatcagccaggcgtggtggcgcttgcctgtaaccccagctactcaggaggctgaggcgagagaatcgcttgaacgcagtggcagggtagaggttgtagtgagcctcgcgagaccaggccactgcactccagcctgggcaactagagtgagactccgtttcaaaaaaaaaaaaagcaggaagtgaggtcggtggatggagtgtaaatgcctgcaggggcttccccatctagcacaggactgccagcctttccttagcagccccccactgcaccgtcttgcagcctgcagcagaaaccacggacggagagcgaagtgcgaaaaagccagctgtccagaagaagaagccaggcgacgcatcctccctcccagacgcagggctgtccccgggctctcaggtcgactctaagtaagtattgggcttgggggaaactcaggccaccagaggatgcccggggtccctgccagggcctcgcagcagtgtggcctcctaaaccaatcacgtttacaaagcacgttcgcaaaggcatttgctcagtagaaactgaatggggaggccaggcagtggctcacgcctataatcccagcactttgggatgccgagacgggtggatcacttgaggtcaggagttggagaccaaccaggccaacatggtgaaaccccatctctactaaaaatacaaaaattagttgggcatgatggcaggcacctataatcccagccactcgggaggctgaggcaggagaatcgcttgaactcgggaggtggaggttgcagtgagctgagatcatgccactgcactccagcctgggtgacagagggagactccgtctcaaaaaaaaaaaaaaaaaaaaaaagcctctagggcaggatccttcctgcctcttctggcttttgggggctccaggtgttccttggcttgtggctccatcactctaatctctgtctctatcggcacttggccttcccctcagtgtctgtgtcttctgtcttctgtcccttaaaaggacacgtggctgaatggatgcagtaggtcacgcctgtaatctcaacactttgggaggccaaggtgggatgatcacttgaagccaggagttcaagatcagcctgggcagcgtggcaaaatcttgtctctgcaaaaaaatttcaaaaattagccaggcagggcggtgcatgcctgtagtcccagctactcaggaggctgaaacaggaggatcccttgaggccaagagatcaagcctgcagtgaactgtgatcataccactgcactccagcctgggcaagagaatgacactctgtctcaaaaaaactttttttttaacttaaaaagataatgagctaggcgcatggcttgtacctataatcccaacaactcaggaggctgaggtgagaggatcatgctcgtgaggccaggagtttgaggctgtagcgagctatgatcacaccactgcactccagactgagtcacaccccaactggaacaaaaagaaaagaaaatggagtccccctgtggcttctgtttggtatccttctttcttcacataactcccctgccagtacaaagaaagggctattgctctttataagataatcctgtgttgtttttttgtttgttttttttttgagacagaatcttgctctgttgcccagtctggcagtctggagtgcaatggctcaatctccgctcactgcagcctccacctctcaggctcaagcgattctcctgcctcagcctcccaagtagctgggagtacaggtgtgcaccaccatgcccagctaatttttttttctttttttttctttttttttttttttgtatttttggtacagaaggggtttcgctatgttgcccagcctggtctcaaactcctgggctcagctgatccacccacctcagcctgccaaagtgctgagattacataggcgtgagccaccatacccagccagatccatttttgtttttgttttttgtttttttttttgagacagagtctcactctgtcacccaggctggagtgcaatggtgcgatctcagctcactgcaacctgcaacctccacctcctgggttcaagcaattctcctgcctcaacctcccaagtagctgggactacaggaacccaccatcacgccctgctatttttttgtatttgtaatagagacagggttttgccatgttggccaggctggtctcaaactcctgacctcagatgatccacccgcctggatctcccaaagtgctgggattacaggcataagccaccatgccaggccagatccttttttgagtcaggcattgatagagcatttgccatgtgtccagtcacagggaggctgggcctcacgtccattttcatttcagacttaaaagaagccacgtactttctcctgcagatccacgtttaagaggctttttctgcataaaaccaaggataaaaaatacagcctggagggcgcagaggagctggagaatgcagtgtccgggcacgtggtgctggaagccaccaccatgaagaagggcctggaaggttggtagcctgcagcctcagggacagacagtagagccaccagtgcccctggggacattcactgtccccaaacggggccttgagttggctgtgggccaagccctaggcacagagccaggggtttctggccctggataaaggcgtgccataggaggtcccctgcatcctccccctgaacccaccctcaccggctgcttcctgtcccccctcagccccctccggacagcagcatcgccacgctgcaggtgagaagcgcaccaaggaaccaggaggcaaagggaagaagaaccgaaatgtcaagattgggaagatcacagtgtcagagaagtggcgggaatcggtgttccgccagatcaccaacgccaatgagctcaagtacctggacgagttcctgctcaacaaggtgggatcactaggcgagggccaggggcatgaggcccggtccccaggggaaccatcacagccaggcattgttttctgaaacacacaacacagggtttagcaggtcaagaatacaaagtccaggctcaggccggggacagtggttcatgtttgtcatcccagcactctgggaggctgagacaggagaatcacttgggcccagcagttcaaaaccagcctgggcaacagagagaccccatctctacaaaaggtttaaatattagctggagtggtggtgcacacctgtagtcccagctcctgggggctgaggcaggaagatcgcttgagcccaagaggtcgaggcaccacaagccacgatcgcagcactgcactccagcctgggtgacagagcaagaccctggctcaaaaaaaataataatgcatatttggtctcaaagcaaagattgatgaagcactgtgtgcaacagaagtggaggcgaacaagctgtggctgccctcaggagggttataccccgtgggggtggggggtgggcaatcctgcagcagatagagctacatttgggagctgcacagcgggcacagggggccgatggggacacagaaggatcaggaaaccctgctaggagtagaggcatcttgaaattaccaggccattccaggcatccccatcctaaggtatggctgggtgttgagcccctgtgtggggcagcaggaagggcctgaactgacctgtagctctcatctaggggggattctgtccgccagggaacactggcaatgtctggggacattggggttatcacagcctcaggggagggcgctgttggcatctggtgggtggaggccagggatgctgcttaacctgctgtggtacacagggcaggccccaatgtggagagtagtcctgccctcaatgtcagtggctttaactctgggttgacaagatgagagaccaggcttggccagagggactggattttatcccgagagcctaggggatgacttaagagaggatagaagtgaccccttgggcacctcctcgggtacgcaggtccccaggcctgaggcacgcagggtcagttcctctccccttccagataaatgacctccgttcccagaagacgcccattgagagcttgtttatcgaagccaccgagaagttcaggagcaacatcaaaacgatgtactctgtcccggtatgtggcggcccggccttcagcctttcccataccctgctcagacccgtcattcccatccgccccttgcccaggcctgcagggtgacgcctagcattcctacagaacgggaagatccacgtgggctacaaggatctgatggagaactaccagatcgtcgtcagcaacctggccactgagcgtggccagaaggacaccaacctggtcctcaacctcttccagtcactgctagatgagttcacccgtggctacaccaagaacgacttcgagccagtgaaggtgggcagcccagcatgccacgcccacctgtgacatgccacgcctacccatgcctcgccatccttagccacgcccacccatgcctcaccatgcttatgccacacccacccatgccctgcccataccacagccactgtgccatgacttgatccacttatgccatgcttacctgtgcctcaccatgatcacttatgccacacccacctgacatgccacacccacccatgccatgccacgcctatgacatgcaacatgctatgcctacccatcccttgccatgattacatgccatgcccacctataccatgccgtgcccatttgtgccacacctacctcctggtggggagccctgcaccctccccaacagagcctcacttctgggtctggggtgtctgaatgggggcgttagggacaatgatgccactccaggtgagggagggttcagggtacccacacgcctgagttatggggtgccaggggtgggttggggctcttcccaggggggcccccgccaacctcctccttgtgttcctcacagcagagcaaagctcagaagaagaagcggaagcaggagcgtgctgtgagtaggctgcacatagatgagagtccgagcaggcgaacattggcaggagcatgcacgtgtgtgtcagtgtcaatgtgcgcatgggcccgtctgcacgcgtatgtgtgcgtggacacgtgtgagtgtgtttttcccccggcatatacggagccgtagtcttgaataagtcacccctgagatcccatgggtcgtcatccaccagtggctggggagggctgccttcccctttccctgcccagcgccttcctctggcctcacaggtccaggagcacaacgggcacgtgttcgccagctaccaggttagcatcccgcagtcgtgcgagcagtgcctctcctatatctggctcatggacaaggccctgctctgcagcggtgagtggctcccccaccaggccccaaaaccctccatgtcccccaccacccctcactgctcaagaggtcttcagggccaggcggggtggctcacacctgtaatcccagcactttgggaggccgaggcaggtggataacgaggtcaggagtttgagaccagcctggccaagatggtgaaacctcatcactactaaaaatacaaaaattatctgggcacagtagtgggcacctgtaatcccagctactcgggaggctgaggcaggagaatcacttgaacctgggaggcgaaggttgcagtgagtcgagatcgcgccactgcaccctaacctgggcaacagagcaagactctgtctcaaaaaaaaaaaaaaaaaggtcttcaccccagcccagccaccaggtcagatctttctggaccgttgtcccagccatatcccaccccctcaaaccgtccaccatcaccggaggagcagagcccaattctcagctggccccaaggcccccagtagccagcacccacccacatctgcagcctcctctcctcgtgggccctgcctctctgtctctgtacacgctgctccaccgcctgaaccatcggcccctccttccccaggctcctcacggtccctcccctgtaggccagactcagccccaggggaccctaagagacagggcccaggaatgacccagctgatccatgctcacacagctttgatatggccaagtcagtacccaagcccaggcagcctccagaggcccagcagggtcaagagggcctctcctacatgtgtttttctgccagaaccatttgggccagggtcttttcagcccagaaggcagccccaccaccccacatctgtccaacagtcagttgtcatggtcctgagataaggatgcgggacccaggcccgtcccctcacctgattccatccttgccaggtgccagacactctcttctttagcgtaaccagtgtaccctctgcaaggcgtcagctgggtggcctgggattcagtgtggttggaagaaggaaaagcagcattgtctttgccccgtgacatcttcgtcccaagtccccaaggccacctcctggcaggacctttagacctttagttctgccagtaggtggccttggggacttggggcaaggatgtcacaggtccccacaaacacctgctcatggttccgctagccaggctgggtctgaggccatgaatggccaccttggagctatgaagtttgtccacacagcctcctctctcaggagtcagggcacaggttcctgcagtgtgggtttagaagttggcaggccaggcacagtggctcacacctgtaatcccagcactttgggaggctggggcgggagggtcgcttgaactcaggagttctaaatcaacctgggcaacatggcaagaccccatctatacaaaaaaaaatacagaaattagccaggcacggtggtgcacgcctgtagtgccagctacttgggaggatcacctgggcctgggaggtcaaggctccagtgagctatgatagtgccactgcactctagcctgggtgacagagtgagaccctgtctcaaaaagaaaaagagaaaccaaaaagaaggcaatccaggccaggtgcagtggcttacgcctctaatcccaacactttgggaggccgaggtgggcagatcacctgaggtcggtagttcgagaccagcctgaccagcatggagaaaccctgtcgctactaaaaatacaaaattagccaggcgtggtggcgcacacctgtaatcccagctactcgggaggccgaggcaggagaatcacttgaacccgggaggcggaggttgcagtgagccgagatcacgccattgcgctctagcctgagaacaagagtgagactccatctcaaaaaaaaaaaaaaaagaaggcaattggcggcccccggccagctgggtgggtggctgcaggaatctggggtccccagcaccctctgtgactcccaccctgtggacctcctagtgtgcaagatgacctgccacaagaagtgcgtgcacaagattcagagccactgctcctacacctacgggaggaaggtgagtgtacgaggcctggaactttctacaatgacactccactcacggccaggtgcaccaggaggtggtgcttgatgtgagggccaagcgaagcattgagcagccagtagggggcggctgtggcctctggttctgcagaacacaccattgtccccggttctgtacaaactccttgaggccctcaggcagggcccaggcctgtgtgtgtgtctcagctcccccagccctgctcatccttgctcctgagagagtcctgagccatgcagagggaggccccccaactctgtgcataaggttggggtcctgggtgctgggggtgcagcaagagtcagggtctacttctgtgaggtggctgtgggggctaggttatagctctctccccacgaaggaccacccatgccttgggtggcctacaaaggaagcccctgcccagtggctgccatgctggccttgacttctgcagccccacacccccaacaaccacgcagaaggagacagggagggacagaacagcagaggaagccctgagggccttgtgcgggaccaggaggcagaggcccccagagacagctggagaggaagacagccaggcccagacctgacccccaaccccggcactgcagggcgagccaggcgttgagcctggccacttcggcgtgtgcgtagacagcctgaccagcgacaaggcctcggtgcccatcgtgctggagaagctcctggaacacgtggagatgcacggcctgtacaccgagggcctctaccgcaagtcgggtgctgccaaccgcactcgggagctccggcaggcgctgcagacaggtgggcgctgtgggcaggtgggtgcagtgccaggccccaggcacagccgtcctgccagtgcgccgctcaccagacccaccccacccaccccacagaccccgcagcagtcaagctggagaacttccccatccacgccatcacaggggtgctgaagcagtggctgcgggagctgcccgagcccctcatgaccttcgcacagtacggcgacttcctccgagccgtcggtgagccccatggcggtgcgggtggcagcaggtggccacagccaggatacagcgttcgctgtgaccagcccaggaggcaggaccacccagttcacaaactgagaaactgaggcccaaagcagtcggcccagccaaaccgggtccccagtttggggtggggccaggacacctctgtagccatccattcttgcctgggcaccacagggtggatggcacctgtgcatctcaggtcgtgttggtggggacaacaggcaccttggggacccttgggagctgacgtcctcaaaccccactgcctgcagagctgccggagaagcaggagcagctggctgccatctatgccgtcctggagcaccttccagaagccaaccacaactccctggagagactcatcttccaccttgtcaagcaagtgcctccccacctgccctctgtggggttagggtcgcattgggaacccgcgaggcagcatttcccaggaggacccgagctggcgttctgtggtggtttcgaaccaggatgcagaccactgttgggggttctgggagggggccaggctgctgggccgcccgggtcccttgaggtacctctctgtgctgcggaagcatctcccagtgctgggctgtggcactgctttcccaacagccaccccagggctcagaagttcagtctcggggctccctggtacctccctccctcggccctagccatcctctaactgccagtggctgtgcagggtggccctgctcgaggatgtcaaccgcatgtcacctggggcgctggccattatcttcgcaccctgcctcctgcgctgccctgacaactcggacccgctgaccagcatgaaggacgtcctcaagatcaccacgtgagtgcccaccctgccccggaggcatgctcagggcagccccacccaggaccccacgacagctccatccatccctgtgtaaataaatgtgtaagaaaagtccagagccgagtgcagcggttcacacctgtaatcctagctactttgggaggccaaggcaagaggatcacttgaggccaggagttcgagaccagcctgggcaacatagcaagaccctacaaaaaatttgaaattggaaatttgtatttaaatataaaaatttaaatttccaaatttaaatttttaaattcaaatttttatttaaatataaaaatttaaatttttgtctctacaaaaaatttaaaaattaggccaggcgtggtggctcacacctgtaatcccagcactttgggagggcgaggtgggtggatcacttgaagccaggagtttgagaccagcctgaccaacatggtgagaccccatctctattaaaaatacaaaaattaggctggacgaggtggctcacgcctgtaatccagcactttgggagaccgagacgggcagatgacctgcggtcgggagttcgagacgagcctgaccaacatggagaaatcctgtctctactaaaaatgcaaaattagccgggcgtggtggcgcatgcctgtaatcccagctacttgggaggctgaggcaggagaatcacttgaatccaggaggcggaggttgcagtgagctgagatcatgccattgcactccagcctgggcaacaaaagcgaaactctatctcaaaaaaaaaaaacaaaatacaaaaattagccaggcctggtggcatgtgcctataatgccagctactgggaggtggaggctacattgagctgagatcgcaccactgcactccagctgggcaacagagtgagactccgtctcaaaaagaaaatttaaaaaaataaaaaatatatatataaactagccaggtgtggtggcaggcgcctgtaatcccagctactcgggaggctgaggcaggataattgcttgaacccaggaggtggaggttgcagtgagctgagatcacgccactgcactccagcctgggcgacagagcgagactccgtctcaaaaaaaaaaaaaaaatccagatggcagtggccccagcagttgtgtctttttgaatgtgctttaatgagcacaccccattgtactaaaacagaacttttttttttctttttgagacggagtctcactctgtctcccaggctggagtgcagtggcacgatctcggctcactgcaagctccgcctcccgggttcacgccattctcctgactcagcctcccaagtagctgggactacaggcgtccaccaccacgcccggctaattttttgtatttttagtagagacgaggtttcactatgttagccaggatgttctcgatctcctgaccttgtgatccgccgtgagccaccgcttccagcctaaaacagaacttttaacaaaggctggatgataggtgaatggtagtggattcctctctctgctacaaagcgtcctgtcacgggaggataaggaacaagcagcagcccctgcaggtcgcaccacagagctcacccaacctgagtccctctggtactgaccactccagactgagtccctctggtactgaccactccggactgagtccctctggtactggccactccgggctgagtccctctggtactgaccactcagggctgagtccctctggcactgaacactccgggctgagtccctctggtactgaccactccaagctgagtccctctggttctgaccactccaagctgagtccctctggttctgaccactccaagctgggtccctctgatactgaccactccaggctgagttcctcccaataatgaccactccaagctgagtccctctgacactgaccactccgagctgagaccctctgatactgacaacaccaggctggccttgaccaccaagtgggcatactgtgggtcagcccatgtctggagcccctggggccatctgcctattgcccctgggacaaactgcccagcagcttgtacttctctgcgaggcaggataattcccaccctactggtgactaaggggttcagttcactctgaccctccttcaaacaaggaggcgtgcagagacaggagacaggctcaaagaggtagagtgagctgccgaaggtcacactgcatgggagctggcacagccgtgtcccaggcactgcttggtctctgagcctcaaccactgccccccaggcaccagctagcatctccctggacctcagacgtccccggggcggtaactgagtcacttcctcccgtgggccttctctgtaggtgcgtggagatgctgatcaaggagcagatgaggaaatacaaagtgaagatggaggagatcagccaactggaggctgcagagagtatcgccttccgcaggctttcgctcctgcgacaaaatgctgtgagtaccggtgatcgtgggggcgggacctctttggtggggcggagcctggtgctgggcagggccttgggcgtggctttgttgctgggaaggctggtgagtggggtcttggtgggcggggccttgggtgggcaggacctcccatgccgaggatgggaccgggtagtgggtgtggtctcgggtagcagggcggggcctcccttcccagttccccgcccactcctaccacacccttggccacaaccagcctggctggggccaccaggccctgcaggtaggggcagacttactgccttgaacgaaagacgatggtcctcgctcagcctcactccaattatgttcctctaggtggggcaggtagggggaccagcttcctgcttgctggtggttcaggtcatgcgtccagccttgtcccttctgacctgggccctacccacggggaaatgttcccatagcagaagaatcagccccacagtgcaggggtgtgttagtggggaacgggctctgggctcctgtgggaaccagggaccccctatcttggtaccggtcattggatgtatccccagctcatgcctgtgtctgtcttggcccgtgtggtcaccctgtgttcatctctctcccagccatggcctctcaaactggggttttcgtctccctatgagggggtcctggtatgtacgcgttcggtgggcccgcggtgcatgtctcccggtgcagtgcatgctggggttccctggggccctgggcccctcgtaggatagacagagcctgtcctaaccttccggaagtgcatgctggggaggccccttgcctgctgaccttctgtgctcaggacgactaatcggccacatgaccaccactctgtcccatgggattcctagagaagtctcactaagagcccagcacactcacatcacaactaacctcctgggatctgctcacacctccggcagtaacctcgcccactcagagatgtcagtgggaccccttgcttctttgtttcagaacaagagccccaagacccgggacatccaggaggaggagctggaggtgctgctggaggaggaggcagccggcggcgatgaggaccgggaaaaggagattctcattgaacggatccagtccatcaaggaggagaagcaagtggctcagtcccctccctcagtccttcatgtttagggcaagctggagtgcaggttccatccctggtggtccgcttgacctcgccaggtttggtcctgtcatccctaacactgggcaaacaacactttttttttttttttttttttttttgagacggcgtctcgctctgtcgcccagctggagtgcagtggtgctatctcggctcactgcaacctccatctcccgggttcaagcgattctctgcctcagcctccgagtagctgggattacaggtgcccaccaccatgccctgctaattttgtgtttttaatagagacagggtttcaccacattggccaggctggtcttgaactcctgacctcaagtgatccacccaccttggcctcccaaagtgttgggattacaggcgtgagccaccgcactcggcctttatttctgagacagggtctttctctgtcacccaggctggattgcagtggtgcgatcacggttcactgcagccacaatcccctaggctcacggggtcctcccacctcagcctccccagtagccggaaccacaggtggtgcacaccaccacgcctggctaattttttttactttttgcagaacagggtccgcctatgttgcccaggctgggttcaaactcctgggctcaagcaatcctcctgcttggggtggggggaggttggggacacagagttacatctaggagcaggacagcctgctctgttccacactggcccagcacttccggtggggtggccttggacaccactaccctttttcctccagggaggacatcacctaccggctgccggagctggacccaaggggctcggacgaggagaacctggactcggagacgtcggccagcaccgagagcctgctggaggagcgggccgggcggggggcctcggaaggtcagtattaaggtagcgtctgcttttctccttcccgtccatcccagcaggccccagggcgagggtcctccggctgccggccctgaagctgcagtaaccctgccatctgtctctcaaaagggccccctgcgcctgctctcccttgccccggcgcgcccaccccgagccccctccccaccgtggccgcccctccacgacgaaggccgtcgtccttcgtaacggtcagagtgaagaccccccggcggacccccatcatgcccacggccaacatcaagctcccaccaggcctgccctcccacctgcctcgctgggcaccgggtgcccgggaggcggctgccccagtgcggcgccgggagccacctgcccgccgcccggaccagatacattccgtgtacatcacgcccggggcagacctgccagtgcagggcgccctggagcccctagaagaggatggccagccacctggggccaagcggaggtactcggatcccccaacgtactgcctgccccccgcctcgggccagaccaatggctgagagccacagctgacaaagtctgcatgtccgaggacggcccctgcactggagctgggcgccagagctgcagagctagtgttcggccctcagagaaggatccagaatcaaaagctcaagagtgacgtgaggtgggcaccggccccaagtgcagagtcaaggcagggagaggccggctggagccaggccccctcgcacgcagcccccaaatcatggacgcacctgtggggagcaccacatctccacctgcggcctcacatctccccactcccctttttgtacgtttaactgtttctttgtacgtggtttacgtaactttaaactgtaacagccttaatggaagaccaaatggttttttatatgtgtatgtacaaagttttctattaacgctgcccgtctcccttataacctggacgtgagctgtcagagcagaagccactaggccactgcgcgtctgaggctcagaccctgctgtggttggcttggggtggccaatgggctgggaccctccatgagagttttggacacttgggtcacctgacccgtgcctctctgacacatgtctccggggggcagccacctggccaatgtgcatttttgcacatgctggaaccttccatgggggtctgggctattggctggagccaggacatgagtcaggggcaccatggacctcacgtgccagggagacttgaatgtggctgtcactcttccggacgccaagggctgcaggaggctgcttttggcactacccaccccgtgtgacagaataggagccagcgactcaggactgctcacgggtcaggagggcaacgcctgaagtcagacctccctataggtcaacagggacaacctggggatctctggagcagggccctcctctctcaggcttggcccactcccccagacacctggacacgtggccacaaatctgggacaaggggcccccgcacagcatgaaataaaaagtgcctgagaagtgtgtgcatgggacgcctgctcatatgggatcgggcttggaagaacagggccggtgggtgggggtctgccctgtggcctcagccaagaagggtgcagaatatgggtggaacactgtcctcaaagttctgtcttgatcctccaccaaacagggagctcccagcagagcctcacttggccaggagcgcctgctgtcctggcagccctctctggcctccctgattcagtgcccagcctctggagcctaaatgtcagctgcagcagccacccatccagcagaggtggccagttcctggtgggcccagcaggacaggaacagatgggctcccaggctgccatcggatgggagtcgtgggaactggctggctggtattggttggggcaccgtgaagaacccaagttcagacagcacatgccagaggttgaggggcttctccaaggccacacagttgggaggggcatggctgggatttagactctgccctgccagcctctagaggcccctttgatgggccctgggtttggtctccattgtttgttgtgggtttttttcttgaaacacggtctcgctctgtcacccaggctggagtgcagtggcgcgatctcggcccactgcagcctccacctctcgggttcaagcgattctcctgcctcagcctcccgagtagctgggattacaggcacgcacaaccaagcccagctaatttttgtgttttttgatagagacagggtttcaccatgttggccaggctgctctccaaactcctgacctccagtgatccatccacctcaccctcccaaagtgctgggattacaggcgtgagccaccgcacctggccctccatggtattttctttttttttttttttttttgagacggagtcttgctttgttgcccaagctggagtgcagtggcacaatctcggctcactgcaacatccacctcctgggttcaagcgattctcctgcctcagtctcccaagtagctgggattacaggcacccaccatcacgcccggctaatttttgtatttttagtagagacggggtttcaccatgttggccaggctggtctcaaactcctgacctcaggtgatccatctgcctcagcctccctaagtgctgggattacaggtgtgagccaccgcacctacccgtctatgatatttttcaaggacatcaggcccactggtgtaaccaaggtgcagatgacctaaggtgtgggaaaacatgaaggctgcatgccaggccctggttcctgtgaagcccccaccctcatcctgtcactccagaagagaggcactgcaaggcataggggtactcagcttccaggtactgaggtgggctgggaaggggttctccatgggggtctgggcgttaggggggacccagccccaccttgctcactctcaggcagagctgtctcatgtgccccttgaggcaggtactgtcacactgtccatttcccgggggaagaagcggatccagaaaagttaaactctcccagggccgaggatggaatcagagctggagctgtgacctggaaacccataaccacaatacagatgagccctgctgaggtgggggaagccttggattcctgaatcccaggctacagaaatcgggaagggtgtgtggacgtgaaatagctccgactgggaagaatccaggtaggagtggggtgcggggaggtactttgagcaggcaaaacagaacaaaagggcacactgcacgcgggtctgacaccagaagaccccggtcgtcctatcattcccgaagggttaacatgctctcgaggaaaagcaagtgattcgcctaagtaagaatggggtggcgcctctcctatttttttaaaatagagatagagtagcgctatcttgcccgggctggcctcaagcaatcctttcccacctctgcctcctaaaatgctggcattacagccctgagccaccgcgcccggcccagcgccccgtctcaaaacaagatattacttccgctccaaacaaagatgggccagctaacgagcgcgggggaaacatccgcccggaaggccacttgaaggcacttccgccctctcttaacatggagccggcggaaggggtggtgtagggccgggcgataatggcggcgtcgaggctggagctaaacctggtgcggctgctatcccgctgcgaggcgatggcagcggagaaacgggacccggacgagtggcgcctggagaaggtgaggggatctcgcactgccgcgtagagcccgactcccggggggtgattcctagggttggaagccacctggcccgactccccggccccagtagcctctcgggcagcgccctttccggtcagtcccgccacgtccacctgtagcttccgcccccgtccctgggactccgcccctcccccactggccccgcctcctttacgcttgacccctcccatttgtcggccccgcccccccgactcccatgatcaggacatgggaaagacccccgggtgacaatccacttttcctccccagtacgtgggagccctagaggacatgttgcaggccctgaaggtccacgcgaggtgagtgcaggcagcctcagggctttcacatcagcacgtggctgtgctactggacatcccagtaccgctatcccagctgggacccttccctgagctggggaccatggacaggttttgtttttcttcttcctgccttccagcaaaccggcctctgaggtgatcaatgaatattcctggaaggtggattttctgaaggggatgctgcaagccgagaagctggtgagaaggggtgcccctgccccctcagcccccatcaccgctcactttggtccccaggacctgcccctccagtgacttatcttcccacatttctgcagacctcctcctcagagaaagcactggccaaccagttcctggcccctggccgtgtgccaaccacagccagagagcgagtgcccgccacaaagacggtgcatctgcagtcacgggcgcggtacaccagcgagatgcggagtgagctactaggcacggtagggctccttccctggtccctgggaatcccttggacaggaataggggttctatgcttgtaggcagccagaaccacaatactgtcagatacaggaaccctaagggggtccagcaatctcttccctgggtcatcacacaaggctgcccaacagaggggcattgtggctaaggctttgctagatgaataggaatttggtacaaggcaaaaatggaatgtgtctggttaagccccagagttggcccaagagcagggtttgagtcctggcttgcaacttacaagacacataagtttcttcagccgtaaaagaggatgacaagttcctttctgagcactttatgtggatcagctcaatcttttaaaatatgagttgttgtggccaggtgcggcagctcacgcctgtaatcccagcactttgggaggccgaggcgggcggatcatttgaggtcaggagttaagaccagcctgaccaacatggagaaaccccgtctttagtaaaaatacaaaattagctgggcatggtggctcacgcctgtaatcccagctactcgggaggctgaggcaggagaatcgcttgaacccaggaggcagaggttgcggtgagctgagatcaagccattgcactccagcctgggcaataagagtgaaactccgtctcaaaaaaaaaaaatatgagttgtcgttaccagtttaaggttgaggaaacaggctcagaggtcatgggatttccccatgtcctgactgaaggtgaggaggttgaggtcagaagggacaggtttgggaacaagacaaggggggtgacttcatggcatttacttttttttttttttttgcgatggagattcgctcttgttgcccaggctagagtgtggtggcgcgatctcggctcactgcaacctccgcctcccaggttcaagcaatactcctgcctcagcctcccaagtcactaggatcacaggcacccccaccacacctggctaactttttgtatttttagtagagatggaatttcattatgttggccaggctggtctcgaacttctgacctcaggtgatctgcccaccttggcctcccaaagtgctgggagtgagccactgcacccagcctcatgccacttacttctttccacaggactctgcaggtgagtcaccatgaacacaacaggacttgagggccagctgactaggacaagacatgtatccttgctgccccggggcctccatgccgagactccatgccctgactccaacaggagcatcaccaaactacacctggaggaagagccaggacagaggaaatggccccgagaggaaacaaagctaggcacagtggctcacacctgtaatttcggaggctgaggcaggtggatcacctgaggtcaggagtttgagaccaacctggccaacatgacaaaaccatgtctctactaaaaatacaaaacttagccggatgcagtgccacgtgtctgtagtcccagctactcgggaggctgaggcaggagaattgcttgaacccaggaggtggaggttgcaatgagctgagatcacaccactgcactccagccggggcgacagagcaagactccgtctcaaaaaaaaaaaaagcaaaaaaattagccaggcgtggtgacgcacacctgtagtcccagcatacttgggaggctgaggcaggaggattgcttgagcctgggaggtagaggttgcagtgagctgagattgcgccagtgcactccagcctagttgacagagagagactctgtctcaaaaataagcaaataaataaattttttaaagctaggcactcccagcctatgggaccaaggctaggctggagggagggacctggggtctgagggaaccgagacaggagtaaggagaccctcctagaagagggggtattcaagcatggtcagaagccaacggggcagcagacaagatgaggaaacagcattccaagcagtagacccagcacaggcaatgctcaggatgccggaaacgggaaaccaacactcgccttttttgcttggcctgttttgctttcagagcctgagatggacgtaaggaagagaacgtgagtgtctgcggccctggggcagtagtggcaattgggcggtgcggcagggacggggtagcagtggccaaaccctggaccaccgaggcactaccacaaggatctaaaccaaccagaagccacttctgtggatgctcttcccagaagtcaaaggccaggcgcagtggctcacgcctgtaatcccaatactttgggaggctgaggcaggcagatcacctgaggccaggagttcaagaccagtctggccaacatggcaaaaccctgtctctactaaaaatacaaaaaattagccgggcatggtggcatgcgcctgtagtcccagctactcaggaggctgaggcaggagaactgcttgaacctgggaggtggaggttacagtgagccgagatcacgccattgcactccagcctgggtgacagagcgagatgctgtctcaaaaaaaaaaaaaaaaaaaaggtcgggcgcggtggctcacgcctgtaatcccagcactttgggaggccgaggcaggtggatcacgaggtcaggggttcgagaccaccctgaccaacatggtgaaaccctgtctctactaaaaatacaaaaattagctgtgcatggtggcaggtgcctgtaatcccagctactcaggagactgaggcaggagaattgcttgaacctgggaggcagaggttgcagtgagccgagatcatgccactgcactccagcctgggcaacagaacgagactctgtatcaaaaaaaaaaaaaaagaaaatgtgttggtcttctcccctttcccactccatctctcatgtcctcctccccccgtgtgtgaaatcagtggagtggcagggtcccagccagtgagtgagaagcagttggcagctgagctagacctcgtcctgcagcgacatcagaacctccaggaaaagctggcggaagagatgctaggactggcccggagcctcaagaccaataccctggccgcccagagtgtcatcaagaaggacaaccaggtgtggggactgggggagctctccagcctctgccctggggcatcagagaaggcttcccagcacaggagcattgtggctggggctttgcgggatgaataggagtttcgtagaaggcaaaaatggcattcccagcagagggcacagcaccagcaagcgacaagaggtgcaggccagtcccagggaagtagagagaggccattcttggccccagtcctgttgacaccttttccacctcccccacagaccctgtcacactcactgaaaatggcggaccagaacctggagaaactgaagacggagtcagagcgtctggagcagcacacgcagaagtcagtcaactggctgctctgggccatgctcattatcgtctgcttcatcttcattagcatgatcctcttcattcgaatcatgcctaaactcaaataaagacccccgcccaccttgtctgtcttccgtctgtcccctgcccccatctagcagtgcctttcaggctggccaatgagatgggagggtttttggaggtccctgaagagccacagacagacagtgcatgagcaggggaagaaccacctcagggccagatgcgggggctcacgcctggaatcccagcactttgggagtccaaggcaggtggatcacttgaggccaggagttcaagaccagcctggccaacatggtgaaaccccgtctctaccaaaaaatacaaaaatcaggcaggcatggtggcgcacgcctgtagtcccagctacttgggaggcttaggcacgagaatcacttgaacccaggaggtggaggttgcagtgagctgagatcccagtactgcactccaacctgagcaacagagcgagactccattgcaaaaaaaaaaaaaaaaagattctaaaaagaaaaagtcagtcttggcaggtggtgactcatcaaacgctgcctccgcccatgttcctctggagcctaccccacaatggacgaggcccagccccaggaggccctaggagcctccgactggcagacttgtagccgaacacagtgccttcagcgatgtaaggccagggtgaggccaaagggcagaacaggggcttggagggtcggggaggagtggggccatgacaggagctcagcctggaggagggcgcatcaacacgaggtcttccctggaattaaaggcaatagttcaaggacacagctcagccacactgcagcctcagctctcgggacactacagatccctcacagtcactcgacaaacacacatgggtcgtgcccagtgctcactggagactctgccctccccaggtcacagtctgatcacttcaaaggagaactgggtgagtactagggtaggggtcctgaaaagggtcgtggagtaggaattctggggtcctgagccctgctctcacaccagctccagacagggcacagcctgtgagagcaactgagggggctcagtgacgagggcttggggtgtctgccccatggcagcattgacggcattgtggggacacttggaggtgcccagtggacccccactgacgtgggtgtaaaatccttaggtagggttgtgtggttttttttgttttgttttgtttttgagacagggtctcgctctgtggcccaggctacggtgcagtagtgcaatcatagctcactgcagcctcgacctccaggcctcaagcaatcctcctgccttggcctcacaaagtgctgggattacaggcatgagccactgtgctcagcccaagtagagatttttaaaagtgctactggcagcttttaaaaagtagaacatagagccaggcgtggtggctcatgcctgtaatcccagcactttgggaggctgaggcgggcggatcacctgaggtcaggagttcgagaccagcctggccaacatggtgaaaacccatgtctactaaaagtacaaaaaattagctgggcatggtggtgggcacctgtaataccagctacttgggaggctgaggcaggagaattgcttgaacccaggaggcggaggttgcagtgagccgagatcacgccactgcactacagcctgggcgacaagagcgagactccatctcaaaaaaaaaaaaaaaaaaaaaaaaaagatcataagaaggagacagccaggcatggtgactcacgcctgtaatcctagctactggggagtctgaggcaggaggaccccttgagcccagggactggaggctacggtgagcagtgatcatgctactgcactccagcctgggtgacagagtaagacccctactcaaaaaaaaaaaaaaaaaaaaaaggaagtttatgcctgagacacagggatgattccttattagaaagccacgttggccagggcaccgtggctcacaccttgtaatgccagcactgtgggaggctgaggtgggaggaccacttgagctcaggagtttaaggccagtctgggcaacatggtaaaaccctgtctctacaaaaaatactaccagctacttgggaggctgagacaggagaatggcttgagcccaggagttcgaggatgcagtgagctgtgatcacaccactacactcctgcctgggtgacagagccagaccctgtctcaaacaacaacaaaagccagctacattaatgcctcagaaaacaaaatcacagatgctgaaatgacaaattgtactgtttagcctccgttacccaaagtctcctaatttaaaaagaaaggaaatagatggacatgttcctcacttcactgaaaaatctcaagccaaagggagcattgactttaatgggcaaatactcaaaacttctgccatcaaaatgaggaataggccaggtgcggtggctaaagccacctgtaaccccagcactttgggaggccaagataggcagatcacttgagctcaggagttcgacaccggcctgaccaatatggtgaaacctggtctctacaaaaatacaaaaattagccaggcatggtggcacgcacctgtaatcccagctactcagaaggctgaggcaggagaatcacttgaactcaggaggcagaagttgcagtgagccaagatcgcaccactacactccaccctgggtaacagaatgagactccatctgaaaaaacaaaaacaaaaaaacggggggaatggaatggggaaggatgcttacagtcgccctgcctccataatgtaacatagtcttgaggtggtagtcagcacaactagacgaaaaaaagaggctgggtgcggtggctcacgcctgtaatcccagcactttgggaggccgaggcgggtggatctagaggtcaggaggtcgagaccatcctggctaacacggtgaaaccccgtctctactaaaaatacaaaaaaaaaattagccgggcatggtagcgggcacctgtagtcccagctactcgggaggctgaggcaggagaacggcgtgaacccaggaggcagagcttgcagtgagccaagatagcgccactgcagtccagcctgggcaaaagagcgagacttcgtctcaaaaaaaaaaaaaaagaaaaaaaaagaaaaaaagaaatggggccaaatatggtggtgcacgcctgtggtcccagatacttcaaaggctgaggcaggaggattgcttgaggccagaagatagagactagcctgggcaacaatagcaagaccctgtcaatagaataaataaaatgccaggcatggtggctcatgtctttagtctcaactacttgggaggctgaagcaggaggactgcttgagcctaggagtttaagacctgactgggcaacatagcgagaccccatctctaccaataaaaatttaaaaattatccaggtgtaggccacctggttggctcaccaggccacactggccaagatggtagaaccctgtctctactaaaaatacaaaaattagccaggcatggtggcgggcacctgtaatcccagctactcaagaggctgagccaggagaattgcttggcccaggaggcggaggtagcagtgaaccgagatcacaccactgcactccagcctgggagacagagcaagactccgtctaaaaaaaaaaaattatccaggtgtggtggtgcgtgcctatagtaccaattattcaggaggctgaggcaaatgatcacttgagcccaggagcccaagtgatcatgctgcactgagctatgatcgtgccactgcactccagactgtgcaacacggtgagaccccatctctaaaacaaacaacaagaaaaaaagaaatgagattgaaaaataagagaagaaaaataagaaatgagaaggcaaaattatttgcagatgatatgaccgtatatatgataggcccaagcgatgtgactaaaaatatttcaataaaagaattccttaagctagcaagagacttatagatatttaaaaattcatttcttgtatactatatatgtatatagctttaaaatgtattaaagcatcccatttatagcagcaataaaaaaagatacactgcctgcttaaacgaattttgttgacatttgaagaactttttttggagtcgcccaggctggagtggtacagcagcacaatcgtggctcactgcaacctccgcctcccggtttcaagtgatctcctgcctcagcctcctgagtagctgggattacaggtgtgtgctaccatgcctggctaatttttgtatttttagtagagacggggtttcaccatgctggccaggctggtcttgaactcctgacctcaagtggtccacccacctcggcctcccagagtgctgggattacaggcataagccaccttgcccggctgacatttgaagaacttctaaaaatcaacaagaaaaaacatttgcaggatataacaggaaaagaattacgaaatagagaaatagtctctaaattttttcactcatacactaggcaatatttccttttttttgagacagtctctcaactgtcatccaggctggagtgcactggcgcaatcttggctcactgcaacctctgcctcccgggttcaagcgattctcctgcctcagcctcccaagtagctgggattacaggcgcccgccgtcacacctggctaattttttatatttttagtagagacggggtttcactatgttggccaggctggtctcgaactcctgaccttgtgatccgcccgcctcggcctctcaaagtgttaggattacaggcgtgagccaccgcgcctagccttagtaggcaatattttcaactttgaaagtacaggtgaggggccagcgctgtggctcacgcctgtaatcccagcacgctgggaggccgaggcaggcggatcacgaggtcaggagatcgagaccatcctggctaacacggtgaaacctcgtctctactaaaaaatagaaaaaattagccgggcgtggtggtgggcgcctgtagtcccagctactcaggaggctgaggcaggagaatggtttgaaccctggaggcggagcttgcagtgagccgagatcgcgccactgtactccagcctaggagacagagcgagactccgtctcaaaaaaaaaaaaaaaagaaaagaaagtacaggtgagggaatccgttatcatgccagtgccgccaaggttgtgggaaaacccctgtatctcttggagcataaatggtacaatctcactaaggagtaacttggcagtatgttccaaatgtaaaatacacacatcccagacaggaggctgaggcaggaggatcgcttgagtccaggagttggaaaacagcctggacccataaggacatttcctctcaaaaaaaaaaaaaaaaaaaaaaaaaaaaaatgccaagcacgattatgggatcacacctgtaatcccagcactgtgggaggctgaggcgggtggattgctggaactcgggagttcaagaccagcctgagcaacgcggcgagatcccgtctctacaaaaaacacaaaaattagggaggcgttgtgtcacctgtggttccagctatttgggaggctgaggtggaaggatcaattgaggctaggaaggaggtcgaggccacagtgagccatgatcatgccctccagcctgggcaacacagcctctctctctctctctctctatatatatatatataaaaggccgatttggggcacactgtctataagttagctctgctctgccaggaacagtactgttcagtaaagatgccatctaacaccacctgctcgcccttaaaagaaataaaagaaaaagaaagaaaggggcgggtgcggtggctcacgcctgtaacccagcactttgggaggccgaggcaagcggattgcttgagtcccggaagctgttcaagaccagcctggctaaaatgacgaaactccgggcgggcgcggtggctcacacctgtaatcccagcactttgggaggccgaggcggacggatcacttgacgtcagaagtttgagaccagcctggccaatgtggcgaaaccccgtctctactaaaaatacaaacaacaacaacagcaaaaaattagctgggcgtggaagtgtgcgcatgtagtcccagctactcgggagccggaggcaggagaaccgcttgaacccgggaggcggaggctgcagtgagccgagatcacgccactgcattccagcctgggcaagtgagactcttgttaaaaaatttttttcatataattgctgaaaaaaataaataagtttaaatttgcaaaaccatcccgttttttcagacaaacttgagggtcgaggtcggagtcgaccatgtttcgaaggtgtgtggccacgcccagccaggtcagccccgcccccaggccgtcaggcccagccccctttcgtcagaccccgcccccagccctgctgagcgaccccgccagtcgggtccatcctgcagtaaatgcacaacccggacggaagtgcctctccgacagcagatccaggctcggagctccagacgctgggacaggtgacccggggcggtagcgagccggacggccttgcaggtggggcggaggtcccgaggagctcctcgggcgcggtcgtctgtgggctctgcgcgccctggaggtcgaggctccggcagcgcgggggttaactcgagccggtcccaggctgcgcggcgacgtcagagttcatttacatagcgcttatttgggttgcgcagtcgtgggcggggtctggacgtcgctgcggaccaatcgcgtgcgtctatgcaaatagcggtcgttctggggaactctgctcccgcggggtgagagttggccgctcttcggccgagctgcccgcgcgtcctttctccgtgcgcgtcgtcaggcgtgtcctctccgcgtgtccacccacaggccgcccgcagaccacccccgccgcgcgcgggacacgacgccccccgcaggacccgcccatcagcccggaaacccctgagctgcttctcccggaggccgatgcccacccgggagcccccaaagactcgcggctcccgggggcacctgcatactcacccgcctgggcctgggcccccggtgagcctgaccgggagggggtccccaggccgggcctctaggcaaaagatttagcccctccagtttgagggactccggtttcccgacaccccgatttaactccagaccacgattcctgtggcagctgcagggactggcgccccgaggcctcaaaaccagcgccccccgccctccgtgccagccccagccgggaccccacaaggcaaagaccaagaagattgtgtttgaggatgagttgctctcccaggccctcctgggcgccaagaagcctattggagccatccctaaggggcataagcctaggccccacccagtgcccgactatgagctgtgagtgtcccccatgtgattcttcatgcctgggatcaggagaggggcactgaggctggggctttgatagttgaataagagtttaccaaagagtagaaaggaaaggatcccttgctgatcagtagtgggattgtccctgtgaataagccactgcactccagcctgggcaacacagtgagatcccgtctccgaaaataaataaataaataggcgaggcgcggtggctcatgcctgtaatcccagcactttgggaggctgaggcaggcggatcacctgaggtcaggagttcgagaccagcccggccaacattgtgaaaccccgtctctactaaaaacacaaaaattagctggatatagtggcgcatgcctgtaatcccagctactgaagaggctgaggtgggagaattgcttgaacccgggaggtggaggttgcagtgagctgagatcgctacactgcactccagcctggacaacagagcaagactctatctcaaaaaataataataaataaattaaaagagggagagaaaaggaacgtttctagtaggggcccagcatggacaaagaaaagcaaattacactgactgggggaaagagtggggttctttacactcacactctgaccctcttcaacctggtagtaagtacccgccagtgagcagtgagagggaacggagccgctatgtcgcagtgttccaggaccagtacggagagttcttggagctccagcacgaggtggggtgtgcacaggcaaagctcaggcagctggaggccctgctgagctccctgcccccaccccaaagccaggtcagcactagggagaaagccctgccccgcagcccttctgagtggcccgacccaagcctctgggacacccactgggtccagatttccaggactctttctcctctcggttggctgggcgccgtgacacatggctaaggtcagcccttgaagtccccactagatgggcatttagtctgtctgagcctcagtttcttcatcccttcttgaattcaactctccctaaaccccctttctactcctccccttgcagaaggaggcccaagttgcagcccgggtttggagggagtttgagatgaagcgaatggtgagtcttgcatcccacagcttggtcttgcacccctgagacttctgtgaggctggggtgcctgtgcccagtttcttttttttttctttcttttgagacagaatctcgctctgtcacccaggcgggagtgcagtggtatgatctcagctcactgcaacctcagcgtcccgggttcaagcggttctcctgcctcagctgggatcacaggcgcccaccaccgtgcctggcaaatttttgtatttgtagtagagatggggtttcaccatgttggccaggctggtctcgaactcctgacctcaagtgatccgcccacctcggcctcccagactgctgggattacaggcatgagccaccttgcccggctcacccggtcgcctgtgcccagtttcaaggagagaaaattgaggctcggagaatgaaaggcagagagttaagcagcttgaaggccacagggcagactgctgcaaagacttccgggtctcgccctgcctaggatcctggcttcctggacaagcaggctcgctgccactacctgaagggtaaactgaggcatctcaagactcagatccagaaattcgatgaccaaggagacagcgagggctccgtgtacttctaagtgcccctgcagatgggcagagggatgcatggggatgcaggtcccttgcatttcttggtatctctcagcttttcctcttgcagctccccctaccaggggtcgctttctcctggattgcaaatgcctcttcagtttggactcagctctgacagcccctcctccaggaaggccttccaggacttcctcctctgggtcctctagctctgaccctacagggactccagatctcaacctgttccctggaagtagggcctgctctccatcccagtgaaataaacatgtattagacacctactgagtataattacttaacacttctgatttcactcagttgtcacacacacaaaaagttgttttttgtttttgtttttgtttgagactgtgtctcactctgtcgcccaggctggagtgcagtggcacgatcttggctcactgcaacctccgcctccccggttcaagtgattctcctgcctcagcctcccaagtagctgggattacagacacctgccaccatgcccaactaattttcatatttttagtagagacggggtttcaccatgttggccaggctggactggaactcctgacctcaagtgatccgcccacctcagcctccaaaagtgctggggttacaggcatgagccaccacgtccagctggattcttcactctctgtgtctccctgggcacttcaggacagcaactgaccccagtgtgtgggcacggtccatatgcatggcctagggggaggctcttccagtgtctgacccatcccaggccctagctgtgatgggtggggcacaggtggggccagtctccctgtgggagccatgtaacagcagaccagaagctgtcctctgagtttcagtctcccaagggagccacaggggcaagaagcaaccaggaagaccaactacatgcaggggagacagcgtcaaccactgggccaccacgattgtcctcaagaaggccctagtctggggaagatagccctgagtccagtaaaagaaggctgcacagcagagtcttaatagccagggaggctcaagatctcttcccgcaggaagggccatgtgggtagggttttgtaggaaaagtaggagttcagcagtcaggccttggacagacatccagatctctggcctggggccaaacagcaggacagacaccatggtctcactcaaccctcagatgtcctgtgcattggataaatgagaccttgctgtccagtttgactggagtagacatggacccactcactcacaggacaccatggagagaccctgacctaatgcaaaacccagtgcagccttcaacgagaacctggtgtcctctccatcccgcccctgcctcagttcccttctgggaacgtgcccacaagaaaccctcactgactccacaggaggggcctaatctctcgtcttccaaggctttcttcaagatggacatggggagactagggagcattttggcaaactggggctgcttaagagctgagcactggcccagcaggcagcgtgacagacttgacttcttcccttgctgttttcaggagggcatctttcttttttttttttttttcagacagtcttcctctgttgcccagagtggagtgtagtggtgcgatctcagctcactgcaacctccgccttccaggttcaagtgattctcgtgcctgagtctcccgagtagctgggattacaggctcctgccaccacgcctggctacagaaggacatcagtgagaggtgccacccccaccaccattcgggccctttctctctgccctacagctctggtgctgaattccacaggtgcctttcccaccacagagctgtgccacacactcccgaggctgggacgggagagtccctggtaccccacatgattccgtatcaacccagtgaagcccacatttcaaagtcttggccttgtaggtgcctgactcccaaacgtcaatctctgaaacagatttttagttccatgtgagaaaaaaaactgaagtcagattgactcaggcacaaaaggggggagactgagttcacagaacttaaaacacccaagggtttcaggtatggcttgatctggggctccaaaggcatcttgggaaattgatcttccatccttggctctgctttaattagattctcccagttccaaatcccaccgtgcaatctcactggctagtttggcatcccagggcctccataaaccagttgctgtggcccagggaatggtggtctctgattggctcgccttacatcatgtgacaggactggccccagaggtttctcccaaggacattggagcccaaacaagattaagggcccggcagctcatgcctataatcacaccactttgggaggccaaggcaggtggatcacctgtcaggagttcgagaccagcctggccaacatggcaaaacccctctagttaaggtacaaaaatcagctgaacgtggtggtgcgcacctgtaatcccaactactcaggaggctgaggcaggagaattgctccaactcgggaggcagaggttgcactgagccaagattgcaccactgcactccagcccaggtgaaacagcgaaactccatctcaaaaaaaaaaaaaaaaaaaaaaaaaaagattaaggttgaccaaaagaaagtaagtgaggctaggcacagtggctcacgcttgtaatccacttttggaggcctcaggtgcatcacctgaggtcaggagttcgagaccaacctggtcaacatggtgaaaccccatctctaccaaaaataaaattagctgggcatcgtggtgggtgcctgtagttccagctactggggaggctgaggcaggagaatcgcttgaacctgtgaggcagaggttacagtgagccaagatcacgccactgcactccagcctgggtgacgaagtaggactccgtctcaaaaataaaaaataaaaataaagaccagggaggctgtgcaggtaggaaatgtctttattattggccttgagtcatcatgtagtgtctgacataggttacgtgtccagaggatctgcctggcacacgctagctacccctgcccactggagcagcccctctggccgacgccaggcctttgtccatcatgccagggaagccaaccccaccatcccacaagttcatgctaggggtgctgaggaacaaggctgtcctaggattggaccctccatcctggacaggggtcctggggaggatgaggctgaggcctggatgatcagtctctttttggtttcatgatcatttaaaaaacagaaaagacaaacatttcacagtctttaaaaaatagaagtctgaggagagaagccagagtcctgggccccgggaggcccctcgaggcctcagcattccctgtcccttgaggtctgtctgcaggcctggccacagcacacgtggccccgtcatggtcactggcccgagccgtagggccagttgaaggtactccccgacagcagcatgtctctgatcagtgtctcaatgggcgtcttccccaccaggcgcatgaagaacagctgggagatgagggaggcagggaccgcgcgcagggcggggagccgcagcagcaggcgcccgaagcgctggggctgggacgggtactgcgcccgcacatactcggtgagggccacctgcgccttctcctgcaggctctcaacgtgggccgggtctgagaggccacaggcgtctagggggacaaaggcaagtcagacaggtgggaggcagctagagaacacagagcccacaggggtgactaggggacaccactcgccactgtgggtaagaacagggggccgggcatgatggctcacggccacagtcccagcactttgggaggccaaggcagaagcatcatttaaggccaggatttgagaccagccagggcaacatagtatgatcccttctctgcaaaaacaaatcagctggggctgggcacagtagctcacgcctgtaatcccagcactttgggaggctgaggcaggtggatcacttgaggtcaggagttcaagaccagcctggccaacatgatgatattccgtctctactaaaaataagaataattagccaggcatggtagtgcgtgcctgcagttccagctactcggaaggctaatgggaggatcgcttgagcctgggaggcggaggttgcagtgagccgagatcgtgccactgcactccagcctgggcaacagagggagaccctgtctcaaaataaataaaaaataaaaattagtccagtgtgatggcacacgcttgtagtcccagctcctcaagaggctgaggtgggaggatctcttgagcctaggagtttgaggctacagtgatccatgatcatagcacagcctgggcgacagagtaataagaccctgtctcaaacaaaacaaaacaaaacaaaacaaaacaaaacaaaaaacgaccctgggatgcaaatgggactatctaagactgtgtcgatcctccagagatagtgaggtgttctcatctaaccagtgacataggggtgcaggcagtgatgtttcaagggtggctggcacccaactcatgcctttggcagggagacaggttctaatttttttttctttaagatagagtctcacactgtcgcccaggctgaagtgtagtggcacgatctcactgcaacctctgcctccgggttcaagtgattctcctgccgcagcctcacaagtagctggcattacaggcacactccaccacgcctagctaatttttgtatttttagtagagacgggttttgctgtgttggccaggctggtcttgaactcctgacctcaagcaatctccccacctcggcctcccaaagtgctgggattacagggccaccagccaggccaaggagatgggttctaaggaagctcgcagggaaggtggggctgggaagggaatttgatgaggaagacagagcccagaagggcctacggtgtgagagaatgtggcagcctctagagagagacccaagataggaagccaagaagaaatctgggaaggccaggcgcggtggctcacgcctgtaatcccagcactttgggaggctgaggcgggcagatcatgaggtcaggagttcgagatcagcctgaccaacatgatgaaaccccgtctctactaaaaacacaaaaattagccaggcgtggtgacgcgtgcctgtaatcccagctactcaggaggctgaggcaggagaatagcttgaaccagggaggcggaggttgcagtgagccgagatcgtgctactgcactccagcctgggcgacggagtaagactccgtctcaaaaaaaaaaaaaaaaaatcttctgggaaaacaataaataaagccatatttattgatttttgagacgcggtctcactctgttgcgcaggctcaagtgcagtgggaaaatcagagctcactggagcctcgaactcctgggctcaagtggttctcccaactctgcttcctaaagtgcggtgattacaggcctgagccaccttgcaggcccaaaaccatatttatcaaatgaaagccacctcccagagtagcctggatctggttcctagccccaaagatacctctgatgggatctagagacttccagtaggttaaagaactcccaggagacaggctggagagatctttgtctaaaggcatggtggcttatgcctgtaatcctagcactttgggtggctgaggcaggactggttgcgcccagaagctcaagaccagcctaggcaacacggtgagaccacgtctctacagaaaacgtttaaaaaaaaattagccgggaatggtggtgcacgcctgtggtcccagctactcaagaggctgaagtgtgagggaggattgcttgagccctggagatcaaggctgcagtgaaccgtgttcggacaactgcactccagcctgggtgacagggtgagacccagtctcaaaaaatggaaatacaaataaaaaaataaagtggaaaaaaaaaatttggctgtaccgccagtcgctggaatacgatgggctaccactgctagatagctgatggttaagaaagttctggggttgccccgcccctcaacgggaggggcctccgagccacgcccctacccagatccctacaaccctggctacctggaggttgccctgggagcccagtgggggcctgagggggccagaaccagggggtcaggaccttccctcccacgtccccccaaccttgtgctatcagtgctcactaagcctgaagagccctttggtgagggagtaggggtctcagggagcctgggaacaggaagagggttctggggtctgggccctggtcctggcccagccttgggtctggggtccggggttcagagttctccgagagtcctgggatcacggagtgggggtgtcacagtgtcacactgcttacatcacccctctacagccacccaagagcgttcactcacggcgcgtgcagggccccaggcctagggagcgagcggggcgctatgggggccggagtctgggtccaggccgccctcctcctaacctcccttgggtccccccatcccgcggccctcttcggagcgtggctcaccgggcgtgaagagcgcgatggccttgaggcagccatactcggccgagtcgacctgcaggcggcccagcttgtccacctgctcctggaaggcgcgcacctggtccatgaaagccacggcgcgctcggcggccataggcgcggcgtggaggccggcggcggccagtagcggcgccgtgtgcaggggcagcgccgcctgcgccgcgttcagcacgaagagctcgctccagctcaggcgcagcagcgccacctggtcggccaccggcagctcggggaagaagggcgcgtggcgcgcccactccacggtgctgaagagcagccgcgccgccagctcgcacacgttgtcgatgcccagcaccgcgcccgccgcgccgccccctgcgccgaagcgtccggccgccgcagggtagggctcagcgcgcagcagctgcgcgatcagttcggacaccggctgccccgggaagaggtctccgccgctcgccactgccgccagcgccgagcccggggggctgcccgaggaggcggccacggcaccaggcagcgagtgcgggatgcggccgcgctgcaccgctgcgggaggcggggacaggagggacatgggggcgggaggggaggcggggggggggggggcgggcagcaggaaacgggggagggacaggagatgggggaggggagggcggggcacagaaggccgggaggagaggagattggagagacaggaagggaagcgaggggtagagaggagagggccggaagaggggggatgaggggccaagtaggtgcccatagagacatggggtggggggcaggtgggggggggcaggtagggagaataacgggaaagggagacaaaagtcatcaaggggtcactcaggccctcccctccaaagcctccaggcccagcctttcccagaatgcccaaccccaccccatgggcgccaggctggttagaaagtaagagtccaggagtccctgtctaggtccagccaccaccccccacccccagctcctggggacaaggaggagcatctaataaaccttttggagcctcctaacagatagtcatggggttcccagagctgaggatgggccatggaggacttggggaccctggccagcttggtccccaaagcaacagatcaatacccacccagcactggctctctcctatggaacagggatcatttctctaccttccatccccctccccaccagatggtgacccctgagggccggtctgggtccctgcagaggctacagtgcagggaagggttgggggggacctacagtaaggaggggtcccaggggggctgccataggtcctcagtaaacattagccgccatcagtagccttgcttatgaagcggggaggccctgctgctggcttgggcacgtctgcagtgaccaggtgggtgagaaaagggaaactgaggcatgaagaggaagagagttggccatgtgcctgcctggcttgtgccggggtgggcgggatggcagggctgactgggctggttgccagcagactaattaatgagctttaatgagctggcatgccccatctcatcacctccgtgaactccaggtcaactctgtgtagagcaaacaccggaggggaacgcgagcagaagccaggggcgaacagagctaagcggagaagccagggcatgggttgaagcccgctccaaggggtccctgagtctgagtcaactgtcaaatggggataggtggatggggcccaaaagtggttccccggtcctccaggaagcttcctcccgctttgttcactgggttgtgagcaaccaccactccctcacatggccacattcccaccccagggcctttgaactttttctttttcttttttccctccctccctcccttctttcctttcctttcttcctctctctctctctccctctctctctctctctttttgagatagagttctgctctgtcaccaggctggagtgcagtggcacaatctcagctcactgcagcctccgactccggggttcgagtgattctcctgcctcagcctcccgagtagctgggattagaggcacctgccaccacgcctggctaatttttgtatttttagtagagacggggtttcaccatgttggccaggatggtctcaatctcctgacctcgtgatctgcccacctcggcctcccaaagtgctgggattacaggcgtgagcccccacgcctggccggcctttgcactttctgttcactcttcctcaaacccctccccagctcttcagcccagactgtggaggttcaaatcccaatcacaactctgttgctctctgacaaatggcctcaccaatctgctgtgtgcctcagtttcctcatctgtaaaatgcagacagtggctcccatttgcaagcctagcactttgggaggctgaggcaggaagatcgcttgagcccaggagtttgagaccagcctgggcaacatagcgagaccccgtctctacaaaaaattaagaaattagcccagcatggtagcgaacacctgtaatctcagctactcaggaggctgaggtgggagaatcacttcaacccaggagtttaaggctgcagtgagctatgatcgcaccactgcactccagacagagtgagaccccgtctcaaaaacgatgtcaccaatcactgaattaaatgagaatctataccttaaaataatgcctgccacacaggaaaggtaattacatggtaattcaagccaaggaccatttattgaacacctactgtgtaccaagccctggtctaggcgctggggaacaagacagacaaaaatacctgcccacagggaatggacattctgggtgtaagcaaattacagaacaagacaggtggcgtcaaatacagggggatcaggagggcttccctgaggaggtgatgtttgagcaaaccttgaaggcaaggttagggagggagccatgtatggacctggaaaaagtgcactccaggcagagggaagagcccgtgcaaaggacccgaggcaggtgtgcttaaagcatgagctgtcatcataaatatttccacccgaggcttttggagacttctggcgaggctgtttgctctgaggccatgacttgagatatatgaggattttaggtaaaatagacaagtagaggcaaaatccatgttatgggggcagggacaagaaagttacccccaaacttaaaagggccacagggagtgatcagttttaaaagaaagcccctcagctgcctctctcagcttctcccaccaaggcctagaccaaaaaacaacagctttacgccaagtatggtggctcattcctgtaatcccagtagtttgggaggccaaggtgggagggtcgcttcaagctaggagttcgagaccagcctgggcaacatagtgggactctgtctctagaaaataaaaaaagctgccgggtggggtggctcatgcctataatccgagcactttgggaggctgaggcgagcggatcacctggggtcaggagttggagactccagcctggccaacacggtgaaacaccatctctattaaaaatacaaaaattaggccaggcgcggtgactcacgcctgtaatcccaacactttgggaggccgaggcgggcagatcacgagatcaggagatcgagaccatcctggccaacatagtgaaactccatctctattaaaaatacaaaaattagctgggcgtggtggcatgtgcctgtaatcccagctactcaggaggctgaggcaggagaatcgcttgaaccagggagtcagaggttgcagtgagccgagatggcaccacagcactccagcctggcaacagagcgagactctgtctcaaaaacaaaacaaaacaaaatacaaaaattaggtgggcgtgccgggcgcggtggcttacgcctgtaatcccagcactttgggaggctgaggcaggcagatcacgaggtcaggagatcgagaccatcctggctaacatggtgaaaccccgtctctactaaaaatacaaaaatatccgggcgagatggcaggcgcctgtagtcccagctactccggaggctgaggcaggagaatggcgtgaacccagggggcggagcctgcagtgagccgagatcatgccactgcactccagcctgggcgacagagcaagactcagtctcagaaaaaaaaaaaaaattagctgggcgtgttggcccgtatctgtagtcccagctactcgggaggctgaggcaggacaatcacttgaacccgggaggcggaggctgcagtgagctgagatcacaccactgcactccagcctggaagatggagcgagactccatctcaaataaaaataaaaataaataaagaaaataaggaaaaaaaaacttcaaagcaggggaggctcaggttagacattagaaagaactgccagcctggcccacgacacagtccccagaggaacctgaaacccagcacaggagatctcgtccaataggctagattctattcctgaaccccagaaatccatgcagaaatctctgggttctacttgaattctaagggggtttggcagagttctaggcccagcagcccagaatacgcccgtccacctgggtcccctgagcagagacagctgggcctcactcttgctcccagcgcccggggtcagaagaaagggtaagctgccctttgccttaatcgggcagagttcctgccttgggcaaacaaaaagcatgggtgaagggtggaggagaaacaaatcaaataaaaaaaaaaatccttgttcagaacgcggtggccgcgctagcagacaagaggtcaccaaggtgtcagggccagggaactggcctctgaggctggagtcgggggtaattggggaaggcagctcctgcaagagaatggggctggggaaagtcccttgtggggcgtccctggcctcttcagctccacggcagcaaccagggggccacggatcctaattggattcctccagcctagggccagactgcagcccacgggatcaagggatcagtggtaatgaggttagcaggcgccggcccccaccctgtgaggcacccagacccctgtgaaagggaggggtgaaagggaggggaaaaaggggaggaagaagctgtttgttcaccccggctccagcggctgtgatcgtccccagtgtgtccccagcacgtactcaccctccttcctcatgcccacccggaagcacttcttgagacggcagtactggcactggttccggtggtgctggtcgatctggcagtcacggttggacctgggggcacacagaagccagggctccctgagacccccatatcctcctccccgaaccagcctatgagccgcctttggaggctgcccctcagaaatactagtaggggccctctagactggagaggtagccccaaaggggtacaggagctcagcttgcaggtctgcaaaccagacaggataacccggatgagtggtgatggatgaagaggaatctgtggaaaagcagatgaacaccccagggagggcacattggcatgggttttgaaggatgaataggagttctccaggtgaatggcggggtgatcccagagagagggtacagccagagcaaaagggttgaaatacacaaatatggaggcctaaagagtttcattttatttggtcactgtcaggctgagcagggtcattgtccccaaaaagatgtgaaggcaaagaggacatggtcagagagctggactttgtgaattaactaggggtcaggccaggggctagtggtctgtggggtcatagcattgtggggccccagcattatcacccgcacaatgcccaccccaaggaatgaggaagtaaacaaagtcactctggtcctcagccctgaaggccccacacctacgctcttccgagaggaccacccaacccctatgcaagctggagattttcctggtcagccctcagtgaatgccgttgcctcttgcagggatgagacaggtggccccaccctgagaggtggtgagctccccatcctgggtcagcccccaagcaggaaggtccaggccttattcttcaaatgtccccagaaccttctccccttggcccctgcccttggactcccctggtctcttgccaccaggagctgggggctctccaaggcctgggcctggagcaactacccctggggttccagctggacacccaggggacacacagagacagtcacagagtagaaccaccacttaagggaattaaacagatgcatctctgcagtggctcacgcctgtaatcccagcactttgggaggcgggggagggtggatcacctgaggtcagttcaagaccagcctggccaacatggtgaaaccccgtctctactaaaaatacaaaaatgagctgggcgtggtggcgcatgcctgtaatcccagctacttggcaggctgaggaaggagaatcgcttgaactggggaggtggaggttgcagtgagccaagattgacccactgcattccagccagggtgacagagtgagactctgtctcaaaaaaaaagaaaaaaaaaaaggctgggtgcagtggctcatgcctgtaatcccagcactttgggaggccgaggcgggcggatcacctgaggttgggagtttgagaccagcctgaacaacatagagaaaacctgtctctactaaaaatacaaaattagccgggcatggtggcgcatgcctgtaatcccagctatttgggaggctgaggcaggagaaccgcttgaacccgggaggcagaggttgcagtgagttgagatcacgccatcgcactccagcctgggcaacaagagtgaaactccgtctcaaaaacaaaacaaaacaaaacaaaacagatgaatctcagctgcagatacccagccctgcccctcaggtggcgactgccccactgagcctcggtttcctcatctgaaaatgggaggtcagatattgccctatcatatgggatggactgggtcagaggggttcacgggggacagtgccaagacccagagcccagccggagaacccaacttaggaaagctgaggatctgcgcccactcccccgtaccccccctccaccactgcctgggtcctgcagcaccagccactgagcccctgggaagaggccccactagggcagagggagctcaggcagaaccagaacaaagcccagcggctgggtggtgggagggtccagggcagccgggtggaaacggcctggcctggggcggccctgcaggcaggcagaggcccagctcaggggcccctgacctcaggggaggccctgaaccttcagtctcaacttccccagctgtggaattgggacagatccatccctccaaggagggaaacagttaagttcttcctgttatcccacctaaagagtgcaagcttttttgcccaaccccatggcccaactcagcttcctccctgggcttctggcctccagtccaatttgatcagagccctctcctgctcacacaccctctatggctccccattaccctcagccagcatttcaggcccacctagctctgacttctcccatggctgcacagtccccctcttacagcacagctcccccagtctgccactaagtgttttgtctggaccacattctggcatgtccctgtggcctttcttccacctgccaactccatgcttcaaggctcatgtcccctagcctcctccaggcagccctctctgacctccaggcagagcctctgctctctccctgggaccccagatcccacagacttggggcatctgtctcactgtgtctcctccagactgggggcttctcaggagctagacttggagctggggtctctctggaggggctggcatcaaactacccaggctgggccccagcgagaccctgctcaatccatttgaagctcagaatggaatggtgatttcaccaggtcacacaactgacacagcacaaacctgtcagctccaagcaaggccccccccacccaaaattgctgctccctgacaccaccctcaggaagctcctgggaccccaaaactgcctgagcccccctcccttaccctccctaaagatatgaccagagagcaggcggttttccagcagcaagaatgaggccaaagtctagtggcccactttgtgctggaggagggagcaaggcagctctgccacacatggccacaccaggccagccctgacccgggacctggggccaaactccaccctcgggtacctggggccctatttggtggcctcagccaacaagccttccatcagccgttctccctggggccactccgatccgaactcagcggtccccaccctagccccacagttcccccacagtgcccccaactcgggcagcgtccctccatgtccaacgcaaagcaggcaccaggacctctctctgggcctttgggcctctgttttgggcagctgggaactgagaccgtctagacgggctccacagagaccctgcatgttcctggggtgcagagtaggggcttataaacggacagatcggatgctcgcccgggaacggtgagaaaagaactcccgggctggacaaccccgatcgctttccctggggaccttccgccagaacagctagcaaggccacgccctgccagagaggtctccgacctgggacagcccaaggctcctgctcggaaacgtttcactccctgcccgtctcagagacacccaaagtttgagggatttttccaggagccccaggtctgcacccacccctgggggagagggacgtttcagtcaattccggtggccctgccggccttccagtggcgatttccggtgacccaaggcccagagtgagcccagaggggttccctgagatgggcaagcccagctcccacccccacccccaccgctgggcccctcatgcgaagaaggccgccccgtgccaccccagcctccctccgtctgccgcctccgtagccacagcgactttggaagtgatatttgaccccaagggcgcgccgtatcgatccgcgcggccgcagacaatggcccctggacgctgcgagctccacggtccaagttccacgttcgattccctcgagggcatcccgcgcgccgggatccccgagaacgggtgccctggggttgggttaccacccctgacagcacccctacccccaccccagcgcggagatgacccctccccagagaaaaagcggagggaaggagaagcaagtaactggggcaaaagcctccagggaccacctgatggggggggaacctgcaacgatgtagcgccgactgtatacacaatcccagccatggaatgcgggaggagggtgctgtgcccctatctcagagggggcagtggaggcccagggaaggtcagcgccaggcccaaggtgaccgagcaggtcagaggcctgccccaggtcggggcggggtgcacggcggcggcgcgcggatggggggctcaccggcaggtgtagctgaggttgcggcggatgcttcgcttgaaaaagctcttgcagccctcgcaggtgaagacaccgtaatgcttgccgctcgacttgtccccgcacaccacgcagtccacctgcagccccggccgctcctcgtcgcccggctcggcgtcgctggcggcaccggggggcgaggccgagtcgtcctcggccgcgcgcgggtagccgcccgccttgtccacgccgttcgtgtcgccgccggggccgccccagccgccggtcaccatggccatagccccagggcagcggggccggggcgcccccaccgcgctcttccctccgggcacccctctcggcccgggggaccctacgcggcgcgcattcggccccggcgcgcggggggcacgggctgcaccccccaaaaaagttttgcagcaacttcctgcggccggtcctcgcgcccgggcggaactggtcgggccggttccaggccaactttcccacgcgtgcgcggggccgggcccggggccgggaggggcacgctagaggcgcgggccgggggcccagaggactcgcgtcccgccgccctggggccccggcgggggcgcgcgggccatggcccggcccgagccgcgcagggggcgtcctctggcctggccgccgctcgcccgggggctgcggccaactcagcgggccgccatccgagcgcgggaggccggggggaaagtttggccgcaagttgcgcggccgcccgtggcggggggggaggggcggcgggtgcgcgccggggctgatcgccgcgccccctgggtcccccggcgcccgcggctgccgctccgggcctgcagggccgctgggccggcgcctctggagctgccgcccccgctgcggccgctcctgcctggcctgggcctgcgcctgggcccaagcctcgctctcgccgccgccaccgccaccgaccccgcgcgccggcctcgcgctgcggccggtttgacacacagcgttccattcgcggggcgggcggggggcgggggcgggggcaggggcgcgcgccgcgggctgggggcgggcgctcgttgccccggcgacggccgcccttataagggcatgggtggccgcgcgcggcgccgggcgaacgggccggcgggagggacgggggccgagcgctgggccgcggggcctgaccctcccccgcctccctctgcccctccccccgcacccccgccctcgccctcgcccagctcgggccttaacccctgccgggccgcggcgggagcctcagccgcgcctgccctctgcccttccttgagcctcgccaagatgtctctccaaggccctcccctccacctctggccttggacgttgggtcgctcgatcaccctcgaggcgcccctcggaacctctccccaccccacagttcctggcaaagcaatgatggggggccagtggcacccggggggggggtacgcccctgcgcaagacacacgcgcgcgcgagacagacagacacacacacacacacacacacacacacacacacacacaccctagattgtgtttgcttcctcttccagaaagtcgccgcgtctgacccccaccccaccctttctctgctcgggttaacacctggtgcccggaatctccagggggaagggatgttgtggtctgagaccggctggccggggccgcgaggtcagggggcccctctgcagaatttctggcctccgggggcagggcgcccacccgccccgcgcggctggaggcgacaggcatgccctgtctgggggcctgcccctttttcccttttaatttccttttctttctgtgctttgcagaaagggcttggcctggcggccggctggactgcagatgtctcttccaggcgccctggagcctcgcagctgccgccacctccaactcaccccatcccccagtaccggggctggggcccgcccgaccagcatttattaagcaccctttgtatgcgaggcccgggctggcgagcctctggctctgggcaggttaacctttaaccggctggacaagcccttccaggagtgacctttcacctcggagtcttgcagccccagccacccagactgtggtcccaccccgccctgagcccagagctggacaccagagcatgcagctgggcctctgagagctctggccaggacagtgccttctgcgcaccccctcctctgcctcccagagccctgatgagacttgaagaattgccctccctggagtagggggaaagattcttagagatcttacaacacttaaaaagaaactgaggttctgggagagccaggcacacccagccctgggcctctcaacctgctccagggacgttctggctgcctgggaggtggaggaggaggcgttagtaaacacgaaaagcaggaaggactaggattagacatgagcaaggacttcccgaggtctagagtcgggttctgcccacagcctgatgtaatccctgctgggagagaggaaggcgtgggtgggcagagacgaccctttggttctgaggctgcatgggaatgtgactggtaatttgggatgagggcagggatcctaggccccttgcctggacctgctaggatctttggtggggagcattggggtggaggtctcagaagggattgaaaagagatttagatgagagacaggcgctgtggctcacgcctgtaatcccaacactttgggaggccaagtcaggaggatctcttgagaccaggagttcaagaccagccggggcaataaagtgagacccgtcttgagcccaggtgttcaaggctgcagtgggttataatcacgtcacgtcactccactccagcgtgagcaagaccctgtctcaaaaaaaaaaaaaaaaagaagagggagagaagactcaaggaatcttgaggggattgtgaaggggagggagcaaagaactaggtttgggggagacaagtcttgcgaggcagctgagagctgggtgggagatgggggaagaaagaccatcgcagatcccagaaactccagtagttccagtcccaaaggctgccccacccccttccagtagcctggccacccctgtgccccctggggcccgcctgggggtggatcaaggctctaccccgcctccctgacccctgcccgcggccctgcagtaacatttgaccttgcggcggccgcaaaccagggacaaaggggcctaggcccatctgctgagggggcacccgtgggaatggccagatcctgctggggcagcctgggaacctgtctccgtcctcccacatgtgaccttggctccctttgcccctccacaggcaacctggtgggaccaggaactcaggtcttagactctggggctcggcagggtacagggaagaaattcagcttctctgccccaccccaacacgagcaaggtggtctgcctccatttccctgctttcttcaaagttggcccaagtccagggacagcgtgtgggtcggaaggtgactagccccagccctcgctggaggggactgtgctcgccaccatacttcttgttctgtttctggggtcaggttgactggattcaagtccaggccgctgactggcgctgacctcaggctgacgtggtcctgccctgggagaggcggtgaacacacctgcacaggtgaggcctggagcacctgcccccaaggctgggaatgaaagtctttctaatccctgtctcgggtttcagctgccaccctgaagggggacagctggccactaatccaagcttggctgggtcgttccaagctcccctttcccagactcagccagtcctggtgtggaggggcagggagatgtgacttatgcaaatgacatgctaattcattgcctgctattaacctgacacgtcccacagctcctgggcccccaggagaaagctggaactggccaccattggcattcattctgagtttctcttgaagtacaacgccccctgagtcccagactattacctttgctatgcctgtcccccacccagaaaccctttaccttattttatttatttatttttgagacagactctcctattttgcctaggctggtcttaaacccctgggctcaagcagtcctcctccctcggcctcctgagatactgggattacaggcaagctcgaccacatggagtccagaaacccttgaccttagctttgagttagtagcaactcgtcatccacaccctgaatctgaaccattccagcttcagtctccctcctttttgttttgttttgtgttttatttatttatttagagacagagttttgctcttattgcccgggcacgatcttgttgttggcgcgatctcggttcactgcaacccccgcctctcaggttcaagcaattatcctgcctcagtctcccgagtagccgggattacaggcatgtgccacaacacccagccaatttttgtatttttagtagagacgggggtttcaccatgttggccaagctggtctcaagctcctgacctcaggtgatcctccccgcctcagcctcccaaagtgctgggattacaggcatgagtcaccacgcctggcctgtttttttttttgagacaaggtcttactctgtgacccagactggagtgcagtggcgtgatctcagctcactgcaacctccacttcccaagctcaagttaccctcccactttagcctcctaaatatctttataggcacatgccaccacgcctggctaatttttgtatttttttgtagaaatggggttttgccatgttgcccaggctggtcttgaactcctgggctcaagtgatctacccaccttggcctcccaaaatgctgggattacagatgtgcaccactgagcccggcccccttcaggaaaatctgccagccaaacccagcatctccctgggaaggggctgccaggagaagctctgtccagtccccatgaatccctccctgggcttcgggagacaggccagttggaacttcagctgtggctatgcaacctcacggacccccgaaatgcgtcagtcccagggacctggtcccatagcccaggttgcttctggcctgaccccactgatatgaagttcacattccacttggtgccaggccaaagacacctgagtctttcttcattgcctggccacaccccatcaggccctggacacccatgtgcaccagcttccctcacgccaaatgtgccccaacatgccaaatcatgcaacatgacatgatgtcactccaggacagtttatgacatgccacagctgtctggcatgtccagacatggctgggtaaggggcctacagaaaggtgtccccaagctggggaggcgggaggggaggcctgggcttccccagggcccttgcagtggcttcgagcaccgccacctcctcggcctgctgagcctccatgagtgccatctgctgctccaacttccggcgttgctcttcctgcttccggtgggctcctcggaaggccaggaccagggcgctggaaggggtgggtggctgggtcaggaaacagcccccgagtccacccaaggcaagggccgtgtactcccactcccagaatgggggctctttcacattgggtctccaagggtcccagctagctggtcttttgttgttgttgttgttgttgtttgagacagaatttcgcgcttgtcacccaggctggagtgcaatggtaagatctcccctcactacaacctctgcctcgagggttcaagtgattctcctgccttagcctcccaagtagctgggattacaggcgcccaccaccacgcccagctaatttttttgtattttttaatagagacagggtttgaccatgttgcccagactggtcttgaactcctgacctcaggtgatccgcctgcctcagcctcccaaagtgctgggattacaggcgtgagccaccatgcccagcctgttttttcttgttgttgttttttgagatggggtttcgctcttgttgcccaggctggagtgcaatggcacaatctcggctcactgcaacctctgcctcccgggttcaagcgattctcctgcctcagcctaccgagtagctgggatcacaggcatgcgccaccacgcctggctaattttgtatttttagtagagatggggtttctccatgttggtcaggctggtctcgaactcccgacctcaggtgatctgcccaccttggcctcccaaagtgctgggatttcaggcgtgagccactgcgcctggcccagcctgttgtttttttttttttttttttagacagagtcttgctctgtcacccaagctggagtgcagtggtgtgatctctgctcaccacaacctccacctcctgggtttaagcaattctcctgtctctcaagtagctggaattacaggcacgtgcaaagacgcctagctaatttttgtatttttagtagagatggggtttcaccacgttggccaggctggtctcaaactcctgacctcaagtgatctgctggcctcagcctcccaacatgctgggattacaggtgtgagccaccacacctgaccgttactgcctatcttggggcagtggggaatgctaaggcccagagacagccagggatacttctgatatcctggtgggggatggtgccagggggattggggggatgcagaacagtcctacctgtgggctttgcataaatccctgttcagctcggcactctgagaccgtctggctcgccccttctgagccacctgttccagctccctgcgcagagactgcagctgctcctgcaggtccagtgtcctgttgcgaaggagaagagagggggctcacagccccagccgatcctgtttcccaggtctcctcctacccacctgcccacagtattgtcatgtaaacacacctgtacaccggggtacaccttagcttctactgcagacgacacccccgggggctctcacataggctgcctgcccaccccccgcacagcccaggacccaggcacacacctggtgagcgatgctgccagttcctgggctaacttctctgggtcccaggctctgcccacctggccaccatcaatgccactggtgccaccagggacagcaggaaggccctaagggaggcagaagacaagaaagtgacattaacctaggccaagtccgtgcttggcccacactggacattggagctgcccagacagtggcagctgctgtgctctcagagacccacatctggttcgatataccaataagagcaaaattatactctgataagggaaatatcctatttaattaaaaaaaattttttttgagacagagtctcactctgccacccaggctggagtacagtggcacgatcttggctgacagcaacctccgcctcccaggttcaagcgattctcctgcctcagcctcccaagtagttgggattacagacacatgccaccagacccggctacttttcgtatttttagtagagacggagtttcaccatgttggccaggctggtctcgaacctcatctctaaaaataaaatttaggggccaggtgtggtagctcatgcctgtaatcccagcactttgggaggccaagacgggtggatcacttgaggtcaggcgttcaagaccagcctggtcaacatggtgaaaccctgtctctactaaaaatataaaaattagtctggcatggtggcagacccctgtaattccagctacttgggaggctaaggcaggagaatcgcttgaacttgggaggcggaggttgcagtgagccaagatcatgccactgcactccagcctgggcaacagagtaagatacggtctcaaaaaaaaaaattagccaggcatggtggcgggcacctggagtcccaactaactgggcggctgaggcaggagaatcacttgaagctgggaggcagaggttggagtaagctgggatcgcagcactgcactctagcctgagcaacacagtgagactctgtctcaaaaaaaaaaacaacaaaaaaacaaaaacaaaaactagagatccactggaagtccttcctcctgtctaatccttgtttgaaataataataattttttttttgagaagagtctcgctctgtcgcccaggctagagtgcactggcgtgatctcagctcactgccagctctgcctcccgggttcacgccattctcctgcctcagcctcccgagtagctgggactacaggcgcccgccaccatccccagctaattttttgtatttttagtagagacagggtttcaccgtgttagcgaggatggtctcgatctcctgacctcgtgatccgcccaactcggcctcccaaagtgctaagattacaggctgggattacaggcatgagccatcgtgcccggacagtaataatttttttttctttttttttttttgagacggagtctcgtcgcccaggctggagtgcagtggcgcaatctcggctcactgcaacctccacccctccaggtttaagcaattctctgtctcagcctctggagtagctgggattacaggcacgtgccaccatgcccagctaatttttttgtatttttagtagagacagggtttcaccatgttggccaggctggtcttgaactcctgacctcatgatccacccgcctcggcctcccaaagtgctgggattacaggtgtgagccaccgtgcctggccaataataattttttaaaaattaggctggacgtggtggctcacgtctgtaatcccagcactttgggaggccgagacgggcggatcagcctgaggtcaggagtttgagagcagcctggccaacatggtgaaaccctgtcactactaaaaatacaaaaattagctgggtgtggtggtgcacgcctgtaattccagctactcgggaagccaaagcaggagaatcgcttgaacctgggacgcagagattgcagtgagccaagatcgcaccactgcactccagcctgggtgacagagcaagatccgtttcccaaaaaaaaaaaaaaagaaaaaaaaaattaaaggccaggcgctgtggctcatggctgtaatcccagtactttgggaggctgaggtgggcagatcacctgaggtcaggagttctacaccagcctggccaacatggtgaaaccccatctctactaaaaaatacaaaaattggccaggcacggtggctcacgcctgtaatcccagcactttgggaggctgaggcaggtggatcacaaggtcaggagatcgagaccatcttggctaacacaatgaaaccccgtctctactaaaaaaatacaaaaaaaattagccgggtgtggtggcgggcgcctgtagtcccagctactcggcaggcggaggcaggagaatggcgtgaacccgggaggcggagcttgcagtgagccgagattgcaccactgcactccagcctgggctacagagcgacactctgcctcaaaaaaaataaaaaataataataaataagccgggtgcagtggctcaagcctgtaatcccaacactttgggaggctgaggcgggcgcatcacctgaggttcagagttcgagaccagccttagtaacatggggaaacctcatctacactaaaaatacaaaaattagccgggcgtggtggcgcgtgcctgtagtcccagctactcaggaggctgaggcaggagaatcacttgaacccaggaggtggaggttgtggtaagccaagatcgggccattgcactccagcctgggcaacaagagcaaaactctgtctcaaaaaaaaaaaaaagagatgaggtctcgctgtgtggcccaggctggagtgaaatgacataatcgtggctcgctgaagcctccaactccgggttcaagtgatcctcccacctcagccacccgagtagctgggaccactgtgataagggaaataaataacaggaaaccgcatctgaagtcactccaggagggcttccttgaggaggtgatgtctaagctgagatctacaggaggtcgaggactttatgacacaaagagggaagtgaccggtgttcctggcagggacacagaatatacaaaggcttggaggtaggagagatgatttaaagagctgcattaaggacaggtgcggcgactcatgcctgtaatctcagcactttgggaggtggaggcaggcgaaacatttgaggccaggagttcgagagcagcctggctaacatggtgaactgcaactctacaaaactgcatctctacaaaacatacaaaaaatagctagatgtggtggtgcgtgtctgtaatcccagctactcaggaggctgagacaggagaatctcttgaacctgggaggcggaggttgtggtgagccgagattgcaacattgcattccagcctgggcaacaagagccaaactccgtctcaaaaaaaacaaaaaaaaaaaggctgtgattgacaagggctatgttctcattagtaagctactcccctaccaggttcaggcagggcagctcacctgataccactcttcctcgtccccgctgctgccacctccgctgctatgtccgccactgctgtttgccccaccagcctggagctctgcccgttcccaccgcagctgctccagcaggagcacgtgagctggacccagggctcggagggcagcctcccgcagctctaggccccgcttctcacgccgcaccagctgcagccgaagcatcaggtccgccagggcctcctgtgggaccaaggagaggggagagaatttatgcttctacggtcaactgcagggaaactgaggccccaagaggcacccactgaggactattcagacaaaaactgtgacttttggccaggcgcagtggctcatgcctgtaatcccagcactttgggaggccaaagtgggtggattacctgaggtcaggagttcgagacgagcctggccaacatggtgaaaacccgtctccattaaaaatacaaaaattagccaggtgtggtggtgcacacccgtaatcccagctacttgggaggctgaggcaggagaatcacttgaacccggcagtggggcagaggctgcagtgagccaagatagcgccacagcactccagcctgggtgagagcaagactccgtctcaaaaaacaaacaaacaaacaaacaaactaggaccttcaccattcaccatgttcttgtgaggtggaaatatcttcctcccataaaagctacagctgtagaaatggcatttcctagaggggcaagtagcttacataggtcaagtattagttctgtcaaagcttctggagtttctctaactccagaacctcaagtttttcatgccaagctacaaacccaagattgtgttctttgctcccatctcttcccataggaagggcattttggagagccagatttgtagtctaatgagaaactgaaccccagaaaacaaactcctattaatccctcaaaaccccagctccaattctcccttcacaatgcctgcactcagcccagcagaattctcctttgctccttggtcccccgacctcagtaaaggattttgtcccaccaagaaagactgacacagtggccacagcccatttgtacccttgcggccaccaggtcctgctgaatttgtgtcttctccagtcggggaagagctgggccagcctgggtccccagaatggcctgcaccatggcttctgcacggggcacagtgggcatgggtgccaaggtggggccaggctctgagagaatcttcattagagaacggcgctcctggagacgctggacatagcttcggagctggaaagccacttcctgtggggtgggcttatccacactgctgccttcagggctatagaaaacagaaaaggtgcctatgtcaacactggcaggcataggtgggttaagttcatgccaatcctggtagggtccatcaccttccatctcactggccacgatggaatctatgccatctttggtggtccctgtcacaccaacataccccactaggcaccaccttccatcaagaccacatggtggccaggtgcggtgatgcatgcctgtaaccccagcactttgggaggctgaggtgggaggattgcttgaagccagaagtttgagaccagcataggcaacagagtgagaatccgtcttttttttttttttttttgagacgcagtcttgctctgtcgcccaggctggagtgcagtggcataacctcggctcactgcaagctccacctctcgggttcacgccattctcctgtctcagcctcccaagaaggtaggactacaggcgcttgccaccacgcccggctaatttttttttttttttttggatttttagtagagacgaggtttcaccgtgttagccaggatggtctcgatctcctgaccttgtgatctgcccacctcggcctcccaaagtgctgggattacaggcgtgagccaccgcgcctggccgagaatccgtcttcataaaaaattagctgcggccgggcgcagtgcctaacgcctgtaatcccagcactttgggaggccgaggcaagtggatcacctgaggtcaggagttcgagaccagcctgaccaatatggagaaaccccgtctctactaaaaattcaaaattagccgggtgtggtagtgggagcctgtaatcccagctactcgggaggctgaggcaggagaatcccttgaacccgggaggcagaggttgcagtgagccgagatcggaccattggactctagcctgggcgacaaaagtgaaactctgtctcaaaaaaaaaaaaaaaaaaaaaaaagacagggtctcactctgtcacccaggctggagtgcagtggtgcaatctcagctcactgcagcctccacctcccagactcaaggcatcctcccacctcagcctcccaagtagctggtactacgcgggcacaccaccatgcccagctaatttgtttgtagttttggtagagaaggactttcgccatgttacaagggctggtcttgaactactgagctcaaacgatctgcctgcctcggcctcccaaagtgctgggattacaggcttgagccactgtgcccggctgtgggtgccagttttaaccagtaggcattgtcattcatcttcatgccaactgcaatgtctgtcaaccaccatgccaactttgtcaagtagcaacaggccaactgcagttgagcctcatgtcaaccaactacagtgagctccataccgaccttgctggacacagccacaccaagccccgaaacgtggtgagctctgggagccccatcccccagtcaagaccccactcctcaaccaggccagttcccagggttccaggggggtaccttggctgtggattctgctgtgctcctgcatccatggcagcctcctcttgtgccagcagcctccatgcttccttttcagctgcttgcaggtcactcatgggggcttcgtctcctgctcctgagtcggcctcccgcagagcaagcagaaccctgtatgcctcttcacagtgttcactgtgggacactggttctgagtgcttcaggacactcagctcggctgggtgcaatggccctcacctgtagtcccagcactttgggaggctgaggcgggaggattacctgaggtcaggagttcgagaccagcctgaccaacatggtgaaaccccgtctctactaaaaagacaaagattagcaaggtgtggtggtacgcacctgtagttccagctactcaggaggctgaggcaggagaatcacttgaactggggaggcggaggttgcagtgagccaagatggcaccactgcactccagcctgggtgacagagcaagactctgtctcaaaaaaaaaaaaaaaaagaaagaaaaaagaaaaaaaaatccacttagctacatcttgctctataggtgccagtccccacttgctcctgaacccctcttctccccactgccctcagctctggaagcatgcagactcccttagcaaccctgaactaaaattgccttaagttaatttctgggccaggcaaggtggctcacacctgtaatcccagcactttaggaggcccagtaggggggatcatgaggtcaggagttcgagactagcctggccaacatggtgaaacccatctctactaaaaatacaaaaattagctggctatggtggcatacacctgtaatcccagctactcaggaggctgagacatgagtatcatttgaacccaggaggcagaggttgcagtgagctgagatctcaccactgcactccagcctgggcaacacagcgagattctgtctcaaaaaaaaaaattaatttctgaagtggggaaggtgctctccagtgagggttctgtggattggggccatcctcagaaagcccactccctccccagctggtgacatcactggcagggtgcactgacctgtactgcaaggccagatgcaatgctgtggcctcagcctcccgctggcctagctgcatgctgaggccttcacagcggcccttgtatccctgtagcacagctgatagcagacgattaaagcatttgagcttctcaatgctcctgttcccgaaggtggggaagagggaaagtcagaggccttctaaggcagtcaggcctcaatttccaccctttccctccctcctgttgcagcttcagactcctggctttataactcagttggaggaggtgcctgtgcccttatgagctcagcatttgagtctcttacccccggagttgctccatctgggcttccatgatgtgcatctcaggactgaggggctggttgggaagagacccaaggatctgggtgctggaatggctgcggaggcgccgaagcagggggtgagccagggagaaggagtcctgccaagaagaagtgatataactgaccccaattgtcaccaagagcctgggattgtaggcattttgcaaccccaaagctgttggatcccatgacaaagatttgagtctcattcccctgaaggctaaggacatcaagaccatgggattgaacttctcgcactcacctgagtctcccagggttccctgtctgcctcagagctgctagaaccactgcctgagccacctgcttggttgtgggaaagatgtgggcagggctccagcctcaagagggaatcctgcagctcttgaacctgggaaagatgagggggacgtcaggcctaggggctcaaaccaaccaccagccctctctccccaaggcctgttcttggggaagtggcaagaaccctagctggaaggcaagaggcttggatacttagcctgccaaaaatctcactatctgaccttgggaatgtttctcagctgctgaggattttatttttcccagcagaaaaatgggccccactctggggaaaaatgaatccctggactgggctccaaagtttttctaccagcctaagatgagggcttccctctcaatatctcattcagccacatggcttttttatttttatttttgagatggagtcttgctctgttacctaggctggagtgcagtggcacagtctcagctcactgcaacctctgcctcccggattcaagtgattctcctgcttcagcctcccgagtagctgggattacaggcatctgccaccatgcctgacaaatatttgtattttcagtagagatggggtttcaccatgttgaccaggctggtcttgaactcctgacctcaagtgatcttcctgactcagcctcccaaagtgctgggattacaggcatgagacaatgcacccagcagccacatggctttaaatgccacctgtgtgctaaggatgctcaagtttctcccttctgccctgctgtctcctctgagccctggactcagacatatagctgctcccttgaggaccccacgtggatgtctcatggacacttgagcttatcaagggctaaagagatctggtcacccccagccaaacctgcctaccctgtagctcctccatctctcccttctagtccagcaggtcccaaagcctgaagttgtccttgacttctctctagccttcacgctcacacgtcagttccatctgccacatcacccagaatccgtccgcatctctccacttctacaacctccaccatcgtgcatgtctggaccaatgaagtcgcctcctggctctccaggagtccaccctcacctccgccaccagagggcgcctgtgaacacctgcgtcgagcatgcccctcctctgctcaaaaccctccagggctctcaccttaatccaagcaaagcccaagcgtctccttgcagcccacgaggccctacgcgatctgcatttgttctccctctgttctgttctggctccccacactctccctgttgccccctgtgttccagccacactggcctccttcgggtttcttgaacaggccagtcatgctgccactccagggcctactcccaccaccctcagttttctttctttttctttctttctttctttcttttttttttttttttgagaaagagttttcttctgtcgcccaggctggagtgcaatggcgggatctcggctcactgcaagctccgcctcccgggttcacgccattctcctgcctcagcctccggagtagctgggactacaggcacccgccaccacgccggctaattttttgtatttttagtagagacgggttttcaccgtgttagccaggatggtctcgatctcctgacctcgtgatctgtgcctcggcctcccaaagtgctgggattacaggcgtgagccaccgtgcccagcattattattatttttttttttttttgagacagagtctcactccgtcacccaggctggagtgcagtggtgaaatctcggctcactgcaacctccacctcctgggatcaggcgattctcgtgccttagcctccctggtagctgcagaattgtgtcaagcaattctcctgcctcagcctccagagtagctgggattgcaggcacgtgccaccacacctggctaatttttgtatttttagtaaagacaaggtttcaccatgttggccaggctggtctctaactcctggcctcaagggagccacccacctcggcctcccaaagtgctggtgtagattacaggcatgagccactgcacccagccaacctggctgatttttttttttttttttttgagacagagtctcactctgtcccccaggttggagtgcattggcacgatctcagctgactgccatctccatcacccgggttcaagtgattctcctgcttcagcctcctgagtagctgggattacaggcctatgccaccgcacccggctaatttttttttgtatttttagtagagatggggtttgaccatgttggccaagctggccttgaactcctgactttgtgatccacccacctcagcctcccaaagtgctgggattacaggtgtgagccactgtgcctggccaacctggctgatttttaatttttttgcagaggtggcagtcttgctgtgttgctgaggctggtcttgaactcctggcctcaaaggatcctcctgcctccacctcccaaagtgctgggattataggtgtcagccaccacacccagccttaaaaggttttttgaatgaacaaatgaatgaatattgcctacatcaggcccacctcctccctcagacagagagccacatgggactcaggatggccccactcacctctttctgcagcgtctccttctcagctcggatggcctccagggaggcctgcgtgcggaccagctcatcctctcggctactcagggccagccggagccaggcattcctctcggccaggcgagctgcctctcgctggcagctccctgccccttcctgcttcccaagggaacctgctcccccttcgcttgtgccttcgaactccatcggcccagaatggctggggggctggtggcgccaggctgcagccgctgcctccagggagctcagagtgtgctggagggtctgaaacacatcgggggccccattcccagggggcacagtctccttgtactgtagggctgcttctggggcttggtgggcttccactgcaggtttgtggggcacttcgggggctgaggccagttccctgccagagcccccatccatcttcttgtcagtcctgtggacaccaactcaggcacttgagtcactccatgctgggcaaggaattcttttttattttttgagacggagtctcactctgttgcccagcctggagtgcagtggcgcgatctcggctcactgcaacctccacctcctgggttcaagtgattctcctgcctcggtcccccaagtagctgggattacaggctcccaccaccacgcctggctaatttttgtatttttagtagagacagggtttcaccatgttggctaggctggtgtcaaactcctgacctcaggtgatccgcccaactcggcctcccaaagtgctgggattataggcatgagccaccatgctcggccctgggcagggaattctgagggcttaaacttcatggtcttggggaggtgtgagcggagcagggagttggcaagagctgcgtgttctgggactggcatcccagggtgagactgggaggctgtgaattcaaggaagaggctagatagaggtggtgaagaagttggaggggagacctggagctgagaaacagagtgaagttggactgtgacgggcactgggaaaggcctgaaggtgagagacagaagtttctggaaatagggtcttctggggcggcggcttacacttgtaatcccagcacttttggaggccaaagttgggggatcacttaagggcaggagttcaagaccagcctggctaatgtggcctgtctcactaaaaatgcaaaacttagccggatgtggtggcgcacacctgtaatcccaactactcaggaagctgaggctcccgcttgaaccgggaggcaggggttgctgtgagccgagattgtgccactgcactgcactacagcctgggtgacacagcaagactcaaaaaaaaaagaaagtcaggctgaaggcaatagggagctatggtaggtgtgtgagcagagcaggcacatcagcagatctgtggatggcaaagatgcgtctggactggagtgaagggcacagaccaagcgggtcttacctgcttcctaggccttggccactgacctcctccatggggcccagctgctccagcccggagctcaccggaggtggggcaaagctgggcttggagctcccactggctgcctcgacctcctctgaactctcagccacgggatccagttcaccctgcaaatgacccccggggccctgctctgagccaggcaggacaggaccttggggtccccaggatctgggtgtggaggggagagggtgacacttacgggtggagcatgcctccctcgccggcttcggggccgcgtggcccgggcactcattgctgtccagaagccagtgccctctgaatgcttctccttcgtcaacccctaaaaccacagcctgccatgagctcttgcctttgttgtcctggacaaaggacaacctcaatttcctctgctgtgaaatggggcactgactacccctcaggaagggattttgttatcaatgttgattgggcagatttgaatgcctccctggacagggagctcactacctaagaaggttgtcctgatctcccccttcttctctgccttctttaccttcactacgtctttgtccactttcctcctctatttgagcctgggaatgcgatctcaagaattccctctcctccccggccctcctaaatgagaggttcagctctctctacctctctgatcctctgggggtaacttgatcagaggcctgagtcccgggacactctgttggggtcactctgaccactgcctgttcaggcctgggctggccaagcctggcctgggaggggctgggaaacaggaaaccccctcccctggtcacgtgacttgttattgtgttgtttccttctcggggacagcggcttcctgcagccctagcggggcacacatacctgactcccaaggtttcagcccctcctcttctcagcctccaaactcatggcccttctagctctgactcttggattttatttctcaagagctagaatgggccgagcaccatggctcacacctgtaatcccagcactctgggaagctgaggaagacagatcgcttgagtccaagagtttaagacaagcctgggcaacatggcgagacccccgtctttacaaaaaatataaaaattagccaggagtagtggcgtacgcttgtagtcccagctactcaggaggctgaggtgggaggattgcttaacacctggaagttgaggctgcagtgagccgtggtcacgtcactgcactccattctgggtaataaggcaagaccctgtctcaaaaagaaagaaaaaaaaagagctagaatgttcccgtgagctgatggtttttatttggctcccctgtgaacttttcttctctgcctgtctcttcattgtgggctgacagttctcttttttttgagatggagtcttgctctgtcgcctaggctagagtgcagtggcgcaaccttggctcattgcaacctccacctcctgggttcaagaaattctcctgcctcagcctcccgagtagctgggattacaagtgcccaccacaatgcccagctaatttttgtatttttagtagagacagggtttcaccatgctgaccaggctggtctcgaactcctgacctcaagtgatctgccagcctcggcctcccaaagtgctgggattacaggcgtgagccaccgcacccggctagggatgggtttttcccatgttggcgaggctggtcttaaactcctgacctcaggtgatccactcacctcagcctcccaaagtgttgggattacaggcatgagccaccgaccccaccagccccagaaacatttaagagccacttgaagcctcagtttatttatttattttattttattagatggaatcttgttctgccacgcaggctggagtgcagtggtgcgatctcggctcactgcaacctccacctcctgggttcaagcaattcttctgcctcagccttctgagtagctgtgattataggtgcgcgccaccacacccagctaattttttgtatttttagtagagacggggtttcaccatattggccaggctgatctctaactcctgacctcgtgatccacccacctcagcctcccaaaatgctgggattataggtgtgagccactgcccccaactcctcagttgtttttttttttttgagggtcaaagaagccggccacattggccaggctctaattcgagaatagccggaggggctgtgtaaggtgagctttgaagcataaagaacttgccagaaaagcaacaggaggaacagcattccaggcagaaggaacttcctgggcaaaggcttagagccttcaaagagccgctctaggtgacacagcgagactccatctcaaaaaaacaaaaacaaaaacgaaaaaaaaaaacacaacaaaaacccagctctactaaaaatactatatatatctcagccgggcctggtggtgcatgcctgtaatcccagctacttgggaggctgaggcaggagaattgctcgatccctggaggtggaggttgcagtgagccgagattgagccactgcactccagcctgggcgacagagcaagactcttgtctcaaaaaaataaaaataaataaataaatacttctggggctaagggggaagtgtgcactaagaagacaacggcagcctgggcgacagagtgagactccatctaaaaaataaaaataaaaaaaaaaggaaggaagcctagggtagtctgatgcggtggtcctcgcctgtagtcccagctacttgagcgatcgcttggctgtagtgactagccatgatcgcgtgactgcagtctagtttgggcgacagagcgataccctgtctctaaaaataagaaaaaaaaaagccatgaaaaaagaggtaggcttgaaataggcccgacttagcttcgctccacctacagtgacccaataagaccagagtaagtattttttgattcatgcaaatatatgtaaaataaggaacaagaattaagtaattgggaagggccctggatgctcaggccacacccacatgggaatacctgccccacatggaggctcaggccagctccaccaatcaccaatcagctcctcctctttccctaaatcggccttctccgtccctcttagcctatcacattgcaagctccacctctattccacgtttcagcctatcacggtagaagcactgactattgtagtctgattcggccaaaaacaaaaattcactaatttttttaatccaatcacatttcatactttgctccagtgtagccaatcacattccaggtcccgccgcacccagctccaggcagctctcactccaaaccccacccccaacccagtttcagcctatcagtttccaagttctttctagcctcaaccagtttctgtctctgcttgttctgcagcccgctgaactacatttcccaggaggcgtcggggctgcgccgtacaacttccggctgtaaagatggcggcttcctagtgagtcggcggctgatttagaaggaggttcaggctacggtgagccgaaggtgggtggtgaaagcgtgtggggcccgttcctaggggcccagctccctttgccccaagagatccagctcctcgcctttcctggggcttccgcctttatttctggtttctcctgcagtgtagcctccatccttcttgctgccgctaaagccttgtttttcttagaggtgtggggactgcaaggcgctcaaagaccatcttgggaagcccgtgcctatttcccagatagacaaactgctccattcgcgtcctgtttctctccaaggggaaccacagtactaatattttgcttctccctcatgcagacacccgctagggacgagggtgtcctagaggttattattcccttattcaccaagacattttcagttttaggtaacagaaaaccctactcaatctggcttaaggaagaaaaggaagttggtggcttatagattgggtctaacaggagctgggtccaggtggtcagaattcgatctgcagttttctcggtggagaccatttcgctttttaccgaggcaaaaggggcccctcacagctctcaactttattctaccagctctgcaactctaatgagagtctcttttccttgatgacactgctagaagttgcagagctgccactcaatggcctgatttgggtcatgtgcccatccctgagccattttcagtggccagagagctgggatgtgctcactggccgagtaggggcatggggctagcactacgttaaaaaaaaaaagaggaaaaaagaggggggactgttatcttatgtcggagtggctgctcggctgagaggtgtaaaaggcagccattctgcagctgaggaaagtgactccctaagaggagtgactcatcatcagtaagcggctcatcgcccctcttccttcttagtaaccaatcttttttttttttttttttttgagacggagtttcgctctttttgcccaggatggagtgcagtggcgggatctcggctcaccgcagcctcccctcccgggttcaagcgattctcctgcctcagcctcccgagtagctgggattatccgcatgcgccaccacgcccggctaattttgtatttttagttgagacggggtttctccatgttggtcaggctggtctcgaacttccaacctcaggtgatccacctgcctcggcctcccaaagtgctgggattacaggcatgagccaccgtgcccgaccgtaaccaaatgtttttaaaactccaaggggaggattctggcttcccctgtccgtgttccatctagccacacaggagccatggaagtggcagagcccagcagccccactgaagaggaggaggaggaagaggagcactcggcagagcctcggccccgcactcgctccaatcctgaaggggctgaggaccgggcagtaggggcacaggccagcgtgggcagccgcagcgagggtgagggtgaggccgccagtgctgatgatgggagcctcaacacttcaggagccggccctaagtcctggcaggtgcccccgccagcccctgaggtccaaattcggacaccaagggtcaactgtccagagaaagtggtaagtagagggggtggcctggggctctgagatgctagggaacctagcatcttgtcttttgggattaacactgcaaacattccctttgtattcgttacctgtggctgccacaagtcaccgtggacttggtagctttcaacaagagaaatttattctctcacagttcttggggccagaagtcaggtgtcgccagggccatggcccctcaggaggctctaagggagggaattctttcttgcctcttcattttgtctgtctttttttttttttttttttgagatggagtttcgctcttgttgcccaggctggagtgcaatggcacgatcttggctcactgcaacctctgcctcccgggttcaagcaattctcctgcctcagcctcccgagcagctgggattacaagtgcccaccacaacgcccggctaatttttatatttttagtagagacagggtttcaccacattggccaggctggtctcgaactcttgaccttgggtgatccgcctgccttggcctcccaaagtgctgggattataggcatgagccactctgcctgaccctttcttgccttttctagcctctcgtggctcctggcattccttggattgtggctgcatcactctagtctttgcccaattttttttttttgtttttttgagatggagtcttgctctgtcacccaggctggagtgcagtggtgtgatctcagctcactgcaacctccgcctcctgggttcatgccattctcccgcctcagcctcctgagtagctacaggcgcccgccaccatgcccggctaattttttgtatttttagtagagatggggtttctttctttcttttttttttttttgagaaggagtctcactctgttgcccaggctggagtgcagtgcagtggcgctatctcggctcactgcaagctctgcctcccgggttcatgccattctcctgcttcagcctcccgagtagctgggactacaggcgcccgctactacgcctggctaattttttgtattttttagtagagacagggtttcaccgtgttagccaggatggtctcgatctcttgacctcgtgatccacctgcctcggcctcccaaagtgctgggattacaggcgtgagccaccgcacccagccactgagatgaggtttcaccgtgttagccaggatggtctccatctcctgaccttgtgttccacccacctcagcctcccaaagtgctgggattacaggtgttagccaccgcgcctggctgtctttgcctaattctgtccagtcctcatatcctcataaagcctttctcactgtgtctctgtgtcttctccgcttctgtctcctataaggacacttgtcatcaaaacaggatcttatctcaagacccttactttaattacatctgcagagaccctgattccaaataaggtcacattcttttttttttttttttttttgagacggagtcccgctctgtcaccaggctggtgtgcagtggcgtgatctcagctcactgcaacctccggctccctggttcaaatgattctcctgcctcagcctcccaagtagctgggattgcaggcactcaccgccacacccaacaaatttttttttttttgagacggagtctcgctctgtcgcccaggctggagtggagtggcacaacctcggctcactgcaagctccgcctcctgggttcactccattctcctgcctcagcctcccaagtagctgggactacaggcgcccgccaccacgcctggctaatttttttgtatttttttagtagagaccaggtttcaccctgttagccaggatggtctcgatctcctgacctcgtgatcctcccgtctcggcctcccaaagtgctgggattccaggcatgagccaccacgcctggcctctttttttttttttttgagacagagtttcactctgtcacccaggctggagtgcagtggctcaatcagggctcactgcaacctccacctcccgggttcaagcaattctcttggtttagcctcctgagtagctgggattacaggtaggtgccaccacacctggccaattttttgtatttttagcagagatggggtttcaccatgttggccaggctggtctcaaactcctgacctgaagtgatccacccaccttgccctccctaagtgctgggattacaggtgtgagccactgtgccaggccaaataaggtcacattctcaggttctgggtggacatgtcttttgggagccacagttcgatccactatatcctcatttctgtgtttctgtgtcacacattctctggctcatttatttacttatctacttggactcccagttcagtgcccattcttctaagccattgcttttcaaagtagatggcttggctgaggattagaggtcaccatactgccttttcagacaaggcagcttgaagagggccagtgagtggtgtgggggccaacgttaaggtcagaggacgctcaccaccctccaactaccttgcagattatctgcctggacctgtcagaggaaatgtcactgccaaagctggagtcgttcaacgggtaagagggacattttagggcttgaacatgcagccatggcagggagggtccagcccaaaagatacggggctctcactctgaaactcacaccagcttggtctggcttcaggcttggcagtatcagagattagcaagagccaggtgcagtggctcatgcctgtaatcccagtgactcgggaggctgagataggaggatcacttgaggctaggggttcgagactagtctgggcaacatggaccccatctctaaaaaaataaaatatatatatgtatgtgtatgtatgtatgtatttatttatttttgagacagggtgtcgctctcttgcctaggctggagtgcaatggcatgagctcagctcactgcaacccctgcctcctgggttcaagccattcttgtgcctcatcctcccgagtacctgagattataggcatgcaccaccatgcccgtttaatttttgtatttttagtagagacagagttttgccatgttggccaggctggtctcaaaactcctgatctgaagtcatctgcctgccttgacctcccaaagtgctgggattacaggcatgagcacccagcctctaaatgtatttttaaaaaattagcgagcatggtggcgtgctcctagagtcccagctacttgggagggcaagctgggaggatcacttgatcccaagagtttgaggctgcagtgagctatgattttgccaccacactccagcctgggcgacagagcgagaccctgtcccttttttttgttttttttttgagacggagtctcgctctgtcgcccaatctggagtgcagtggtgcgatctccgctcactgcaagctccgcctcccgggttcatgccattctcctgcctcagcctccgagtagctgggactacaggtgcctgccaccacgcctggctaatttttttgtatttttagtagagatggggtttcaccgtgttagccaggatggtctcaaatctcctgacctcatgatccgcctgcctcggcctcccaaagtgctgggattacaggtgtgagccaccgcgcccagccgaccctgtctctttaaaaaaaggaaaaaagaagccgggcttggtggctcatacctgtaatcccattactttgggaggccaaggtgggcggatcacgaggtctggagttcgagaccagcctggccgacatagtgaaacccccacctccactaaaaatacaaaaattagctgggcacggtggtgcgtgcctgtaatcccagctactcgggaggctgaggcaggagaatcgtttgaatctgggagatggaggttgcggtgagccaagatcgcgccattgcactccagcctgggcaacaagaacgaaactccatctcaaaaaaagtaaaataaaataaaaaaagagtagcaaggacaactggtaatgttaaggctatggcccattgaggctccattcatagcaatgagttggagacgccaagaagcaaagtgacttgctcaagggctcagagtaatggggcagagccaggattcggacccaggcctggctggccctgaagcccttgtctggagtcatgtgctgcctgcagctgtatctggagtggggggcagtttgggttgcaggacctggatggggcttgaggacctccttggagatgttgaaggtgacaccttcttcccctcagtggcattcacaactgcccatggctgagcaaagttcctgcaatgactctaggggaaacttgagccccatgctgcgcagagggacccatttggagagggcaggagctccgatgtcagccagactgggtttgtggctgagctccgccacacccctgcagtatgacctatacctccagggccttatcatgcagggttttcagaggagggtggctgaaggaagtttttttttgtttgttttgtttttttttttttttttgagacagagtctcactctgtcgcccaggctggactgcagtggcgcgatctcagctcactgcaacctccgccttctgggttcaagcaattctctgactcagcctcctgagtagctgggattacaggcactcgccaccacgcctggctaatttttttgtatttttagtagagatggggtttcaccatcttgaccaggctggtgttgaactcctgacctcgtgatccacctgcctcagcctcccaaagtactggaattacaggcgtgagccactgtgcccggccctgagggaaccttaattcccctgtactctctgcctccccagctccaaaaccaacgccctcaatgtctcccagaagatgattgagatgttcgtgcggacaaaacacaagatcgacaaaagccacgagtttgcactggtggtggtgaacgatgacacggcctgggtgaggctgcggcaggcgctgggtgccctggggtcccctggggcccggggagcatcgcactgaggcctctgcttccctgcagctgtctggcctgacctccgacccccgcgagctctgtagctgcctctatgatctggagacggcctcctgttccaccttcagtatccttcctggcagagatgtccccatgaagggggctgtctccttctgtcatccttggggcccaggaaagtctaagtcatgactctggctggctgaggttcagatctcagatctgccaaggctgggaaagtcacccctctgagcctcagtttccccatctgtactgtggaaggcacaaagttgcctaccccatggagatgctgtaacaatacagaagcaaaagtacctgatttggtccgggcatggtggtccatgcctataatcccagcgacttgcgaggctgaggcacaagaatcacttgagtccgggaggcggaggttgcagtgagctgagatcttgccactgtactccagcctgggagacagagtgagactccgtcttttttaaaaaaaaaaaagaaagaaatacctgatttgtattcaggaggtccaaaattcatgcacaaggggatcacctcacacaggactgggcatacagtcagtgctcaataaatggcagtgtgtgacagaagtgtcaccattgttcctacagccacttgaacctgggcgcaggacattttatggtaatttggacataaaaggctcatgtgtggcccaaaactgaaatagaataggactctcgtaagttaaaaaaggaataaatggtgagagttttttccaggaggacaagacacccctggctcttttcattttgaggagagtggccccagccatgcaggaaaggggacctttttttatttttgctcctgttgctcttgttgccctggctgagtgcagtgatgcgatcttggctcattgcaacttccacctcccagcttcaagcgattctcctgccttagcctcccaagtagctgggattacaggtgtgcaccaccacacctggctaattttgaatgttttgtagagatggggtcttgctatgttgcccaggctggtcttgaattcctgggctcaagtgatcagcccaccccagcctcccaaagtgctgagattacaggcatgagccaccatacccggccccattctgttttaaaacataaattagattccatcccatcccatctctgctccaaaacctcccatggctccctgtggatcttatttattattatatttttttttgagatggagtctcgctcttgttgcccaggctggagtgcagtggcacgatcttggctcaccgcaatctccacctcccgagttcaagcaattttcctgtcttagcctcccaagtagctgggattacagacatgtgccatcaggcccagctaattttgtatttttagtagagacagggtttcaccgtgttggccaggctggcctcgaactcctgacctcagatggtccacccgccttggcctcccaaagtgctatgattgcaggcgtgtgccaccatgcctggcataccaagagtcttaaagtcatccggtaccagcatcctattttgtgatccatgctgaggggaatttgtgtgtcagagagggcaagtgacttggccagggtcacatggtgcgtccctaggggtgccgggtctcctctggtatcgggatcggggaagccacctgtttcccgctcactcgtgctctactagccttctccttagcacccccaccagatctggaaggacttttcagcctcatgtaagtcccctgtggggaaattcttattcaccttcaaagagaagggtcacttctgggaaaaagctccaaacggcacagaagtaatctagggagccttaaagcctcctcccttcctacctcgccccgagcaattcctcatttatgtgtgtcttgggagcatgggggctggtggagatgcacatgctgctaggcagctccagctgacggcagtgatgggggatgttcaggacactgagggtggccgggcccagtggctcaggcctgtaatctcagcactttgggaggccgaggcgggcagatcacctgaggtcaggagtttgagaccagcctgcccaacatggtgaaaccgcgtctctactaaaaatacaaaaattagctggccacctgtaatcccagctacttgagaggccgaggcaggagaatcgcttgaacctgggaggtagaggttgcagtgagccgagatctcaccattgcacttagaggggtggggctgggaacatgctcagggcagagggaaccgcttatgggatgcctcacaggcagcagtgaacttgggagacatcagtggggcctcacctgcccggtgagcatctggggtctctctcagggtgataagaggggcagacccccacaggctgctctgactgctccctcctcccgggtatgcagccagcagaaaactgagcttccggtcacagagaacgtgcagacgattcccccgccatatgtggtccgcaccatccttgtctacagccgtccaccttgccagccccagttctccttgacggagcccatgaaggtgggtgaggcctgggagagggaggggtgcctgcagccatgaggatggtggttagacaccaggagggacttccaaccacagaggctggggtgcctagaggtaagttcccagagtctgaggcagaaatgggggagctatagtcatggggcacggggtgacccaagccccagaggctggtgttctttacttcccctgcagaaaatgttccagtgcccatatttcttctttgacgttgtttacatccacaatggcactgaggagaaggaggaggagatgagttggaaggtgagaggctgcagcaggtgtgagtagcaggcgggtgtggacaggatgtcttggaacacacctgcactgggtctgggggtctctacctccatttgatacccctggaaccctggttggggtaggtcatggcattggtcattgaacagccgtttcccagttgtctgctgtgactgatggggtggcagccattgggacgatggtccaggcaacatgttgagtcctgcctcccccatctccaacgttccctgcgttcctttctttcttgcttgcttgcttgcttttctttcttcttctttttttttttttttttgagacagagtctccctctgtctcccaggctggagtgtagtggcatgatctcggctcactgcaacctctgcctcccgggttcaagcaattctcctgtgtcagcctcccgagtagctggggttacaggtacctgccatcataccaggttaatttttgtatttttagtagagacggggtttcaccatgttggccagactggtcttgaactcctgatctcaggtgatctgcctgcttcagcctcccaaagcgctgggattacaggtgtgagccaccacgacccgctccctcttccctttcttcctgcctttgacctcgctgcaccctcagcctggagcatccatccctcttggactccccaggccctgctgggccttcacatcccagacctgaattagctgtgggacctcgagtggactacttacttctctgagcctcagtttacccaactatgaacagggaattgagaccagctcctccttatatctcagtacccaaatcaaaagtcccccctctagccaggcgtggtggtgtacgcctgtggtcccagctgctcgggaggctgagacaggaggctcgctagagctcgaaaggtggagattgtagtgagctgtgatgaagccactgcactccagcctgggtgacagggcggagaccctgtgtcaaaaaataaaaatacggccaggtgtggtggctcacacctgtaatcccagcactttgggaagccgaggcgggtgactcacttgagttgggagttcggaccagcctgaccaacatggagaaaccctgtctctactaaaaatacaaaattaaccaggcgtggtggcacatacctataatcccatctactcaggaggctgaggcaggagaatcgcttgaacccgggaggcagaggttgcggtgagccgagatcgtgccgttgcactccagcctgggaacaacagcgaaaccctgtctcaaaaaaaaaattaaaaaaataaaataagtaaaataaaaagtccctcctcttgagaagccctccctgtttttcaagaaggatcaaagtgggggccaggagaatgtgtctgtatctgactgtgtgcctccacactggggactcttttttttttttgaggcggagtctcgctctgtcgcccaggctggagagcagtggtgtgatctcggctcactgccagctccgcctcccgggtttgcgccattctcctgcctcagcctcccgagtagctaggactacaggtgcctgccaccacgcccggctaattttttgtattttttagtagagacggggtttcactgtgttagccaggatggtcttgatctcctgaccttgtgatctgcccgcctcagcctcccaaagtgctgggattacaggcgtgagccaccgcgcccggcccacactggggactctttgggggccatgactgggacctcttcagatccttaacactgggtccatggcggggaatgtttgctgaatgtgtgaatggtttctgcttggcaaactcctcttcaccctttagaacccaccccagatgtcccctcttctgagaagccctccagggatatgaagggcctgttggggtaacctctgcctgaacagcccttcactgacccccgcctccccggcaggatatgtttgccttcatgggcagcctggataccaagggtaccagctacaagtatgaggtggcactggctgggccagccctggagttgcacaactgcatggcgaaactgttggcccaccccctgcagcggccttgccagagccatgcttcctacagcctgctggaggaggaggatgaagccattgaggttgaggccactgtctgaaccatccctgtacatctgcaccttcttgtgcaaggaagtccttggcctaaagccttggttctcaaactgggttccttgggacctccggggtgggggggttccaggaggcacgtagggtaccttgcagggtcctaggagggaaacccaggattccaggagggatcccaggaactgtgggcacccattttctgtgtctcccagcccatttccactcctagtttgtcatggataatttttgttcttccctgtgtgatttttgccatcaaaataaaaatttgagactcgttaaccgaagtccacgccaatcactttgtgttaatggggatcatcttcattgcaagtgatggaaaacttagccactgagcaaaggtgagtggctgctttcttgtagatgaaaaagccccgggatgtggaggttgcagcgagttgagattgcaccactgtactccagcctggtgatagagtgagagcttttctcaaataaaaaagaaaaattcaaaaataaaaaagatgaaaaagccaagagaacagcttcaggcttggctgtgtccaggtgctaggacaacattgccatttgggagggtactacatggttgctagtcaatgtgccctgcttaccccccaaccaatggaaaggtgtgtgatggcttcaaccactccccagaccccaatccaggtcaaggcagagttctctcagcatctggatatgattggactcccccggggggatacatgaccttcaattaagagctagtcatgtaccagggttgtgtgatgttctgatgagccaggcctggatcatacatccctaagggggaggtttaagagctccatcagcagtactgaggccatgataggagggttgcttgaggccaggagttcaagaccacgctggacaacatagcaacatttcctgtctctacaggaaatgcaaaaattaagccaggctcggtggctcacgcctgtgattcccagctacttgagaggctgaagtgggaggatcacttgaacctaggaggtcgaggctgcagtgagctgtcatcgcgccactgcactctagcctgggtgacagagcaagaccctatctcaaaaataaacacaaacagctttattgagtgactgcttttcctccctatgagcattttttggaacctatcgtgtgtcaggcccttgtgcccaagcccctgttcaatccccgcatcaacctcgttaggattctcacattttgcagatgggacactaagactctcagaggtccagccctccaaaatactgaagtcctagttccgctggattgaaaatgggcaacgcagaacggggactggaaattttttaaaaattgtttttaaagacggggtcttggccaggcgcagtggctcacggctgtaatctcagcactttgggaggccgaggtgggcggatcacaaggtcaggagttcgagaccagcctgaccaacatggtgaaaccccgtctttactaaaaataaaaaattaggcgtgatggtgcatgcctgtaatcccagctactggggaggctgaggcaggagaagctgttgaaccctggaggaggaggttgcagtgagctgagatcacaccactgcactccagcctgggcaacaagagcaaaactccgtctcaaaaataaataaataaataaaacaaagacaaggtctccgcctgtaatcctagcactttgggaggccgaggcgggcggatcacctgagatcaggagctcaagaccagcctggacaacatggtgaaaccccatctctactaaaaatacaaaaattagccgagagtggtggcacatgcctgtaatcccagctacttgggaggccgaggcagaatagcttgaacctgggaggcaaatgttgcagtgagcccagattgcgccactgcactccagcctgggcgacagggtaagatccggctcaaaaaaaaaaaaaaaaaaaaaaaaaaaaatagggcctcactccgttgcccaggctggtctcaaactcctgcactcactaaaagaaaagaaaagcaacaacaaactagtaggctcaaacgatcttctctcctcagcctcccaaagcactgtgcttaaaggcgtgagctgggccctcggcctgggggttggaaattgaagcctctattttatgtatttatttattttctgagacagagttttgctctgttgcccaggctggagtgcagtggtgtgatcatggctcactgcatcctcgaacttccgggctcaagagattctaccaactcagcctcccaagtagctgggaccacaggtgcaagccacccacgcccggctagttttttgtatttttttgtagggactgggtttatccaagttgcccaggctggtctcgaaccccagagctcaagcaaccctcctgcctgggcctcccgaagtgctgggattacaggtgtgagccaccgtgcccggcctaagcctctcataaggccgtgctccctgccagaggccacccttgaagaagattccctgagacttaatgacctggggcaccccggactttcttaatcgtagctccacccactcgagccgggtgccttcgcgtttcccgtttttaaatgagatagtggcacacccggtggcatcctcccacccgggctcttatcggcggtcccagaccctgcttgagcgcctccgggtgtcaagggcccctgaggacactaaagctctcgaaccccgatgtggacccccgtgcggcgcggggcagcctggctgggaaccctgctcggccctggagaggggccccccgagccgaggggaggagcggcgcatgcccacaagccccccgcgggaagtaggaaatcgaccgaccaggcggtgcgcttcggacccagccagggcatgtgctcggaggcccgcctggctcgcaggttgcgggatgcgctgcgggaggaggagccgtggtgagggcggggccgggggcgggccaggagtgggggtctttggccggggtccactctgaccgcggtgtttgcagggcagtagaggagctgctgcgctgcggcgcggaccctaatttggtgctagaggacggcgcagcggctgtgcacttggcggccggagcccggcacccgcgcggcctgcgttgcctcggggccctactgcgccaaggcggggaccccaacgctcggtaagatagagcctgggtccggggcggggtctccccaagccgaagtctgggaatccgggaaggggcgccccatcatcccgggccaggcctcggggctcgagggtggggtttaggggatcttggggagggaacttgggggtccaagggcaggggctagggctcgagggaggcgctggggtcccagaccgagggcgtggaatggggctgcgctaggaccaaagtggggatcaagggttcggatattggagtggaggcaccagggtcagacggcagaggtttgggtcctggcctgaggtcatagcatctaggttccaagggcagtgtaccagggtggacggcggagatccgggaggccgagaacgaaggctccaggtccccagagcggagatcggggttcctgccgggaggctgagtccgcaatgacccctcttgcgctgccgccccagatctgtcgaggcactgacgccgctgcatgtggccgccgcgtggggctgccgccgcggcctggagctgctgctgagccaaggagcggacccggcgctgcgcgaccaggttgggaggcactgcgcgggcaaagaaaggctgggtgagcccagagggagggaaggaaggtaagagggcctcgggcgccccctgctgaccgcgcccctgtaggacggactccggccgctggacctggccctgcagcagggacacctggagtgcgcgcgagtcctgcaggatctcgacacgcggaccaggacccggacccggatcggggcagagactcaggagcccgagcctgcacctggcagtgagtagggcctgcagggctgctggggcttgacttctggaccagtccctgacatccagggtcttccccaccccacccattggttctgaccgtctcacatccactatttgtggccagctctttcggcctcagacactctgatctcctttttctgtttgatcctattctcatcgctgtctcatccctcctcctctcctctctggcccccactctcacctgcagccccaggcctctctggacctaccgatgagacgctggactccatagcactccaaaagcagccatgcagaggtgacaacagggacattggcttggaggctgacccaggaccccccagcctccctgttccccttgaaactgtggacaaacatgggagctcggcgtcccctccagggcactgggattacagctcagacgcctctttcgtcacagcggttgaggtctctggagctgaggacccagcctcggacactcccccctgggctgggtcattgccaccgaccaggcagggacttctgcatgttgtccatgccaaccagagggtacctaggtctcagggcacggaggcagaactgaatgcccgtctgcaggccctgactctgaccccaccaaatgctgctggcttccagtcctccccttcctccatgcctctcctggacaggagtccagctcatagccccccacggacaccaacccctggagcttctgactgccactgcctgtgggagcaccagacatccattgatagtgacatggccacgctctggctgacagaggatgaggcaagctctacaggtggcagggaacctgtcggcccttgccggcacctgccagtctccactgtgtctgacttggagttgctgaagggactccgagcacttggtgagaatcctcaccccatcacacccttcaccaggcagttgtaccaccagcagctggaagaagcccagattgctcctggttagtcttcccagggcacatggagtccagggagcctccaggaatctcccggagaaccccagctctcagccccactttcctccccatctcagaatcatcccttcctccatctcccttgacttccaggcccagagttttcagggcacagcctagaactggctgcagccctgcggacgggctgtattccagatgtccaggcagatgaagacgcgctggcccagcagtttgagcagccagatcctgccaggaggtggcgggagggggtcgtgaagtctagcttcacctatctgctgctggaccccaggtactcagggcaggaaagccccagaaatagaaactagaaaatttggggattggtttttatttgctgtgtgcccttaagaaagggactggccctagaatcatcagctgcttcttcttctttttttttatttttttaagacggagtttcactcttgttgccaaggcaggagtacaatggtgccgtctcggctcactgcaacctccacctcccaggttcaaacaatcctcttgtctcagcctctcaagtagctgggattacaagcacctgccaccacgcccgactaatttttgtatttttagtagagacgaggtttcaccatgttggccaggctggtctcgaactcctgacctcaggtaatccacccaccctggcctcccaaaatgctgggactacaggtgtgagccaccgcaccggcctctttttttttttttttttttgaggcggagtctcactgtttcgcccaggctggaatgtagtagcgcaatcttggctcactgcaacctccgcctcctgggttcaagtgattcttgtgcctcagcctcccaagtagttgggattacaggcatgtgccaccatgcctggctaattttttttgtaattttagtagatatggagtttcaccatgttggccaggctggtcttgagctcccagcctcaagtgatcctcctgccttggcctcccaaagtgttggcattacaggcatgagccccggctggccatggtggctcacgcctgtaataccagcactttgggaggctgaggtgggcggatcacctgaggtcagcagttagagaccagcgtgttcaacgtggagaaaccccatttctactaaaaatacaaaattagccaggtgtgttggtgcatgcctgtaatcccagctattcaggaggctgaggcaggagaatcacttgaacccaggaggtggagattgcagtgaactgagattgtgccattgcactccagcctggggaacaagagtgaaactctgtctcaaaaaaaaaaaaaaagaaagctgctgaatgtctttggggagccgctgactctctctgatcctgtaatcaggagtcactagacatgggttcaagatatgttgtgactttaaggactgcctctggggaccactgtatccacttttccctgtctgagctatccccttcatccagggagactcaggacctgccagcccgagccttctcactgaccccagctgagcgccttcagactttcatccgtgccatcttctacgtgggcaaagggacgagggcccggccatatgtccacctctgggaggcccttggtcaccatgggcggtcaagaaaacaggtgtgaggacagggatcagggttcagcgagggcagtcgggccatgggcaggggagggtattgggggtgctgactcctgattctgccctagccccaccaggcctgccccaaggtgcgtcagatcttggacatctgggccagtggttgcggtgttgtgtccctacattgcttccagcacgtggtcgctgtggaggcttatacacgggaggcgtgtattgtggaagccctaggtgggtgcctggtacctagaatgggggtcatatgaaaggcatttggcttcccagttccctcatttttttccttctgaggggtgttcatttgttgactgagcaattattgagcaccaactttgaacctgcacatgcatgtattttgctccattggtttatccccactcaagggcaatacacattgggtttgctgtcacatacttttttgtgtgtgtgtgagactctgtcgcccaggctggagtgtggtggcgtgatcccgactcactgcagcctctgcctcccaggttcaagtgattcttgtgcctcagcctccccagtagctgagattacaggcacatatcaccatactgtgccaagctaatttttgtattttttagtaaagacagggtttcaccatgttggccaggctggtctcgaactcctggcttcatgtgatctacccaaagtgttgggattacaggcgtgagccaccatacccagccgcctgctgtcacacacttctgctggatggggaggtgtccccatggctgcccctgtgaccccacatccaatttctccagggatccagacgctcaccaaccagaagcaagggcactgctatggagtggtggcaggctggccacctgctcgtcgccggcgcttgggggtgcacctgctgcaccgtgccctccttgtcttcctggctgaaggcgagcgacagcttcatccccaggacatccaggcccggggctgagtgctggggagttggccatccagcctggggagaaatgtttgaatgttccagctgccccatgctgacagcagcccccatctctggtttcagaaggggtgtgtgtgtgtgtgtgtgtgtgtgtgtgtgtgtgtgtgtgtgtttgtgtgtgtgtgtgtgtgtgtagggagcacccaggcagatctcccccaggctgagagaggactttgttacagatggtactgctggagaggtagtaagtagtgagctccccatcgtgggaggaggacaagaagggaagcagaaggtgctttggaacagtccggtgcttctgtaagaggcgtttgaacctgggcaactccacctggaataggagctgggtaaaatgaggctgaaacctactgggctgcattcccagatggttaaagcattctaagtcacgggatcaggtaggaggtcagcacaagataacgggtcataaagaacctgctgataaaacaggttgcagtaaagaagccggccaaaacccaccaataccaagatggcgacaagagtgacctctggtcgtcctcattgctacactcccaccagcgccatgacagtttacaaatgccatggctggccaggcgcggtggctcacgcctgtaatcctagcattttgggaggccaaggagggcagatcacctaaggtcaggagttcaagaccagcgtggccaacgtggcgaaaccctatctctactaaaaataccaaaattagctgggcatggtggcgcgtgcctgtaatcccagctactaggggggctgaggcaggaggatcgcttgaacccaggaggtggaggttgcagtgagctgagattgtaccattgcactccagcctgggcaacagagcgagagtctgtctcaaacaaacaaacaaaaaaacaaatgccacatcaacatcaggacgttaacctttagaccctatatggtctaaaaaggggaggcatgaataatccaccccttgtttagcatatcatcaagaaataaccataaaaatgggcaaccagcagccctgccctgtctatggagtagccattcttttattcctttagtttcttaataaatttgctttcactgtactctatgaactcgccctggattctttctagcgtgagattggagaaccctctcttggggtctggatcgggcctttctggtaacactttggcagcttggtgctgtcaaaatggatggagcctgccaggcgcggtggctcacgcctgtaatcccagcactttgggaggctgaggcaggtggatcacaaggtcaggagattgagaccgtcctggctaacatggtgaaaccccgtctctactaaaaatacaaaaaattagacaggcatggttgcaggcggctataatcccagctactcgggaagctgaggcaggagaatggcatgaacctgggaggtggagcttgcagtgagccgagattgtgccactgcactccagcctgggcaacagagcgagactctgtctcaaaaaataaataaaataaaatggatagaggctgcttttaccgcccagacatgggacacccacatggcgggttggactgggggatcctcagctgcactcaggatatctacccagctcaagagccaagttcactgctacccagccgtgagacctctgatcagtattttatctgcctgagcatcagtttccttggttgtacagtggaggcagtaaagaggtcctactccaggggatcattgtaaggtcatgttggggctgggtgtcacgcttgtaatcccagcactttgggaggctgaggcgggagcatagcatgagcccaggagtttgagaccagcctgggcaacatagcaagactctatctctacgaaaagtaaaaacattaggcggatctggtgggtgggcctgtggtcctagctgcttgggagcctgaggtgggaagattgcttgagcctgggagttggaggcttcaaggagctaccatcacagcactgcactccagcctgggcgatatcaagatcctgtctcttaaaaaaactataaaaatttaaaaataaggtcatgtgagcaaagtgtgtggctcagagcccaaagtgtgtggcagtgcagcccaggcgagaacttgctggaggaaggggaggtgtgggggccctcaaggggccgcctgtgtgatgaggcgtgagcagggctgggaccctcctcaggatcattgtgcaaccccagcctcccctgttgcttctgggaacctgtttatccactataaaatgggattattggccgggctcggtggctcacgcctgtaatcccagcactttgggaggccgaggcaggcagatcacctgagttcgggagttcgagaccagcctgaccaacatggagaaaccccatctctattaaaaatacaaaaattagctgggcgtggtggcgcatgcctgtaatctcagctacttgggaggctgaggcaggagaattgcttgaacccgggaggcggaggttgcagtgagccaagatcaagccattgcagtccagcctgggtaacaagagcaaaactccgtctcaaaaaaagggagggatcattaataataacccggcagggcgtggtggctcacgcctgtaatcccggcactttgggaggccgaggcgggtggatcacctgaggtcaggagttcaagaccagcctgaccaacatggtgaaaccctgtctctactacatacaaaacatgagccgggtgtggtggtgagcacctgtgattccagctacttgggaggctgaggcaggagaatcacttgaacccgggaggcgaaggttgcagaaaactgagatcgcgccactgtaccccagcctgggcgacagtgagactccgtctcaaataataataataataataataataataataataataataataataataataaataacccgacttccagcgatgctatgcgacttcagaccattcatgtgcaaaggtcttaagtaaataccaagccgccatcctggtgagatgtcagcggtctggtttcgggcgggcgggggtcgggggggggtcgagggcatttaagcttctggaagtcgcttctgcaaagggcccggtgcatttagggacttgggagagatccgctgcctcattggtttcaggacctgccggtcatcacggcggtttagccaaccaggtcccccagggggcgggctgtgacctgggccgagtttccacccacctcgccactgcttagccaccggctgctcctcggggaatggctggtattgtgattaggggtccagtctctggagtgggtttgggctcgaccacttgtaatcgagctgaagaaaccgctctctgagcttcactttcctccagtgtaaaacaggggccaggcaccgtggctcacgcctgtactcccagaactttgggaggccgaagcgagtggatcacctgaggtcaggagttcaagatcagcctggccaacacagtgaaacactgtctctactaaaaatacaaaaattagccgggcgcggtggcgggtgtctgtaatctcagctactcgggaggctgaggcaggagaatcgcttgaacccaggaggctgaggctgcagtgaaccgagattgtgccactgcactccagcctgggtaacagagcaagacactgtctcagaaaaaaaaaaaaaagtgtgaaacagggatgcctcccagttgccaaatctaataataaagccacaggtgttatgacactgtgccatcgccccagaatacacaaacaggacattggtaaagaacctagagcccccagaagagatgggatttgtctaacacagggtttcccaatcttggccctaatgacatttggggttggcttattctttgctgtggggtctgtcccttgcatttcagggtgatgagcagcgttcctggcctccatccactagaagtcagcaacacccatgcacccccaaacatggcgatcaaaaatgtctccagaagttgccaatggacacaattgcccccctggctaaactaaggatggagctcacaaaccggtggggaaaggacagaaccgagggaaagatttcctccctcctcctgtaatacacagaaaccacagataggaccagatatacatggaccagaataaaatgtaggtgaggtgcggtggatcacgcctgtaaccccagcactttgggaggccgaggcgggtggatcacgaggtcaggagttccaagaccagtctggccaagatggtgaaaccccgtctctactaaaaatacaaaaattagctgggcgtagtggcaggagcctgtaatcccagctactccagtggctgaggcaggaaaatttcctgaacccggggggcggaggttgcagtgagccgagatcgtgccactgcactccagcctgggcgacagagtgagactctgtctcaaaaaacaaacaaacaaacaaacaaaaacaaaaccaaaacccaactaaaagacagatttggtggtttcaaaagaaaagtcttcttgacaaaggtggccctaaaccaagctgaaagatataacacgggaatagtaaaaggtcctgacttgctgggtggggttggatgagtcgaattcaatgaaccagtgggtggcaggcattcaacacacagcctggaaaacagtgggcactcaattatggcagctctaattccatgcaacacccactgatcttcacctaaacctcggttggatctcttccggccagggaagggctcatctcgtttttttttgagaaggagtatcgccttgttgcgcaggctggagtgcagtggtacgatctcagctgaccgcaacctccacttcctgggttcaagcgattctcctgcctcaggctccccgagtagctgggaccacaggcgcgtgccaccattcctggcttgtctttgttttttgttgttgttgttgttgttgtttgtttgtttgttttagatggagtctcgctctgtcacccaggctggagtgcagtggcacgatctcggctcactgtaatttccgcctcccgggttcacgccattcttctgccacagcctcccgagtagctgggactacaggcgcccgccaccacgcccagctaattttttgtattttttactagagacggggtttcactgtgttagccaggatggtctcgatctcctgacctcgtgatccccccacctctgcctcccaaagtgctgggattacaggcgtgaaccaccgcgcctggcctgtctgcatttttaaatagagacggggtttcaccattttggccaggctgttctcgaactcctgacctcaggcgatactcctcggcctcccaaagtgctgggattacaggcgtgagtcaccacgtccggccggggtcacctcttgataagttgcctcctgccctgggggatactgtccaaggagcctcagccttctgaggtacgaggggaaattcaggaagctaacgtggacaccagacattgtcgaagtcgatcctgagcgcgaggcaccagcctgagcccagtctgcagatgggaaaactgaggctccaggcggcgaacaccctgccctgtggtcacccagcacaggtccggagactccgattgtcacttctgtttattgagttacaagttgagatgtgcaggttcggtggcgccagcccccccatcccccccccttgggcaaaaatagctcccagcgccgaggaatggggggtaggaagggtctcggataacgggatggggcctcgagggtccctgtggggctcgtgggtcccaggatcaagcacggctgacacggaagacagcggggtggggggcctgccttggccgtggcgttggggggaaggtgagggagagcttctgtacaaggtcatcttccgtgagggtcccggctgcggccccaaaacgccgatgggccccgcgggacggaagcggagagcggaatgtccgctgggctccctcggatgccacgccccgcccaggcagcctgggggcgtctccctgacctggccccgcccaccggagcgaacggcccgcccaggtggtctgcgctgcagacctggcgcaggctcgggcctcctcctgctgcggctgtgctcaccaagcgatgccccgccggcccagcggctacttcttgtcttctggaggcgccggcagtggctccggtagagccttgggcgagggctcgggctcccagagcaggaattcgtggagcagcgtgttgaccgtctcagggcattccagcatcaccatgtggctgccctcgtcgatgagcttcaggaatgccaggagcaggatctgcagaagacgcagggctcaaggtaggcgggggcaagagggtggagagaggccaggcttccctgggactccgccatacacacatggcccacagcatccaaaagtccctcctcccatctaccctgcatctctccacttccactcaagggggagctggaggatggcctgtagccctgctggaacccaactagtattcaggcatccagcatttattaagtgtctacagtatgccaggagaaggattttcttctttttttcttttctttctttttttttttttttgagacagagtcttgctctgtcacccaggctggagtgcagtggcgtaatctcggctcactccaacctctgcctcccggcttcaagcgattctcttgcctcagcctcccaagtagctgggattacaggcacgcgccactacacccggctaattttttgtatttttagtagagacggggtttcgccatgtttgtcaggctgatctccaactcctgacctcaggcgatctgcccgcctcggtctcccaaagtgctgggattacaggagtgagccaccgcgcccggcctggaggaggattttgtcaacttcaactctaccaacattaggagctggatcattctttgctgggggggcgggggtgggcggggaaggggcgggtagctggggtgggggctgctatcctgtgcatttgtagggtgttgagcagcatccctggcctccacccactagatgccagtagtaccccctccccctcagtcgtgacacctaaaaatgtctccatgcatttccacgtgttccttgggggcagaatcctccttagttaagaaccaccagtccagttatactttaatggtttttgtttttttttttttttctttaagaaacggggtcttgctctgtcgcccaggctggagtgcagtggtgcgagcatggctcaccacagccttgaactcctgggttcaagcgatccgccccactcagcctcccaagttgcagcgattattggcgtgaaccacctcgccgggctagtatccagggctattctaagtgctaaggatccccagaccctttctaatctgaactcgctaattagagtttctaatctaaagatcccctggtgccggtcttctagaattatataggtcaccggtctcatacaaatcctccgctgtgaggagagccttcttacagcggtggggacagtgcgtaattgctaacacctgtccagggcagccctgctttctagattctacttctgatgctagacctaatgctcctgtttgcctggggtcagaacaagatacagcaactagaggccacgcccacccggcagccacgccccctcgggaagaaagcacgcccaccaagcgctaccacgccccccgcagaggccacgcccctcccgggcagcaccctggggatttgtagctgtggcgccccaggtgcccgcctctacctcggccatgcgctggtcttcctccaccggcacaaacttatcgtgcatgccgtggacaagcaggacgggcacggtgagctcggcgtggtagacctcgtcgccctcgggccagtactggccgctcatcatggcccggagtacgaaggatgacacgttgaaagcgttgccctcctttaacagctgcttctccttggctccttggcgggcgaagccggccctggtggtggtggaggcaccgctagagccccttatgccagcccgactgccgtggggtgcccccgatgccagccctagtcccagcggtacagtcccccctcccatccaactcgagcagatgcctgggttcgccagggccaggatcacggtctttggggtggggacactcacttgaggaagctccaggccaggcagggcgacaagcagtgcaggacgcaggtgggcatgttgaagattgagcagaagctgggctccagcgccgtagggcccccgccattgatcatgatcaccttgtgcactaggtctgggtactcatgtgccaggaatgtgcagaaagagacactgcccggaacgggtggggtgataggaggattgaagggaggcggtcagcaggatacaagcagtgaccattttgttttgctttgtttttgtttttgtttgagacagttttactctgtcccccaggctggaatgcagtggctccatcttggctcactgcaacctctgcctcccaggttcaagcgattctcctgcctcagtctcccgagtagctgagattgcaggcgcacaccaccacacccaggtaattttttttttttttttttttttttttgagacggagtctcgctctgtcgcccaggccggactgcggactgcagtggcgcaatctcggctcactgcaagctccgcttcccgggttcacgccattctcctgcctcagcctcccgagtagctgggactacaggcgcccgccaccgcgcccggctaattttttgtatttttagtagagatggggtttcaccatgttggtcgggctggtctcaaattcctgacctcaagtgatccatccgcctcggcctcccaaagtgctgggattacaggcctgagccactgcgcctggcctggtttgtttttgtttttgagatggagtctcattctgttgcccaggttggagtacagtgatgcaatctcagctcactgcaacctctgcctcctgggttcaactgattctccttcctcagcctcccgagtagctgggagtacaggcatgcaccaccacacctggctaatttttgtattttttagtagacacagggtttcagcatgttgctcaggctggtcgagaactcctgacctcaagtgatccacccaccttggcttcccaaagtgcggggattacaggcatgagccactgggctggcctgttttgtttttgtttttgagacaaggtttcgctgtcgcctaggctggagtggtgcggtggcgtaatcatagctccctgcagccttgacttcctgggctcaagagatcctcccacctcagccttctgaatagctgggactacaggcatgtgccaccatgctcagctaatttttaaaaatttttttataaagacagggtctccttatgttgcccaggctggtcttgaactcctgggctcaagtgatcctctggccttaacctcccaaagtgctgggattataggcgtgagccgtgacacccggcctggtgagggggttcatgtcctccccctacccagaaggcaggtccttggaagccaagattcttcccctggggtccatggacacctgaaggggtgagggatgagtgcggcctctcaaataccgtgaaagtgtgagtttgagtgttgaggatggaacttattttgaagagagaatctggatccagaagtttcaccagactttttattttaattgtttaaaatttttgtagagatgggggtctcactatgttgcccaggctggtcttgaacttctgggctcaagtgatccttccaccttggccttccaaagtgttaagattatagatatgagccactgtgcccggccctcatcagattcttcaagccaccatgacccaaaagcggtaagaattactcatcagcaagtggtaggaaagcaatctgattaaacaaatgcttccggctgcccaggggaggtcactgtttcctactatcccttccctttcaggatgttctgccacctgcctctgggcatgacatatctgtcttccttatacaagatggaaggcctgagaagcccccaaagctgagctcctcattcctacaaaagcaggggtcaacaaactatgtacggcctgtgggctagtcatttgcttttttaaatacagtttacacttttggagatttgaaaaatgtttcctaaataaggtttttttttttttttttgagatggagtcctgctctgttgcccacgctggagcacagtggcgcgatctcggctcactgcaacctccgcctcccgggttcaagtgattctcctgtctcagcctcccgagtagctgggattacaggcatctgccattatgcccggctaatttttgtatttttagtagagacggggtttcaccgtgttagtcaggctggtcttgaactcccgacctcaggtgatctgcccaccttggcctcccaaagtgctgggattagaggcgtgagccaccgtgcctggccaaaaaatgtttcctaaataaagttttatcagaagttccaacagtgactgtatggcctgcaaacctaaaatattcgctatccgatcctttaaggaaatgtttgccagcccctgctgtaatgaggaaaggatacagacaggagtcaggcagacctgattgtgtcagggacttcctgtatgcctttgggcaggttgcttcacctctctgagcttcagcctccacattcctgaagttgtaaatgtgctgacctaatagcactgttatggggtcatgggaactattgtaggtgggtgttttttttgtttttttgtttttttctcgagacagagtcttgctctgtcactcaggctggagtgcaatggtgcgatctcggctcactgcaacccccacctcatgggttcgaatgattatcctgcctcagcctcccaagtagctgggattataggcacctgcaaccatacccagctactttttgtatttttattagagacggggtttcaccattttggccaggctggtcttgaactcctgaccttgtgatccgcctgcctcggcctccaaaagttctgggattacaggtgtgaaccactgtgcccagcaggtgggtgctcatttaattagaggaatcatttctcataagcatcaacttttgagtatgttatataaagaaatataaacaaataagagctgttacctctcagtctagattcctttcttttagatacttatgtaacttctttgttttcttttcttttttttttttttttactttttagttttttgtagagatgagatcttgcttatgttgcccaggttggtcttgaactcctcagctatagcagtcctcccacctcagcttcccaaagtgttgggattataggtgtaagccaccacacctggccacttatttatttttcttttttctttttttttttttttgagatggagtctcactctgtcacccaggctggagtgcagtggcacaatctcggctcactgcaagctccacctcctgggtgcacgccattctcctgcctcagcctcctgagtagctgggactacaggcgcctgccaccatgcctggctaatttttttttgtattttttagtagagacggggtttcaccgtgttagccaggatggtcttgatctcctgacctcctgatccgcccgcctcggcctcccaaattgctgggattacaggtgtgagccaccacgcctggcctttttttcttgtctaattgcataggctagaatctctaaaacagtggtgctcaacttgcctggctgttcaatcttgcctttcttcctggataaaggagagaatgaggccacttggtagtggtcaagccctggggaccaagccttccatggaggggttcttggtaagttttaggttgtattacctgccctttaagcaggagtgaattacagtaacccatgcctttgtaaatgcctagaatttacaggattccgatgagcgcttcctgaatgcacagtgttctccagggcagttgattttttaacttagtctaaggcagtggttctcagctgggggtaattctgcccaccagggcacgcttggcaactactgaagacatttttgactgtcatgatcaacactagattgtgtagttgcatccagtgggcagaagccagggatgctactaaacatcctatagcccctcacagaaaaaaaataacctggccaaacacgatagtgctgggattgaacaacactgcttttttttttttttttttttttttgggcagagtctcactctgttgctcaggctggagtgcagtggtgtgatcttggctcactgcaacctctgcctcccaggttcaagtgattctcctgcctcacacccccgagtagctgggattacaggcacacaccatcatgcctggttaattttttgtacttttagtagagatggggtttcaccatgttggccaaactggtgttgaactcctgacctcaagtgatctgcctgctttggcttcctaaagtgctaggattacaggcgtaagccactgcacctggcctgagcaacactgctttagaacaatgtgaaacaatatcagtgatgacggaaatccctgtctgattacatatgctaatgggagttttcagcctggtatagcggctcatgcctgttaccccaccacatcgggaggccaaggagggaggatggcttgagcccaggagttcaagaccagcctgggcaacataatgagaccccccccccattctctatataatttttttttgaacttgaaaattggcctggtgcgttggctcacgcctgtaatcccagcgctttgggaggccgaggagggcgaatcacgaggtcaggagatcgagaccatcctggctaacacggtgaaaccccgtctgtactaaaaagacaaaaaattagccaggcatggtagcgggtgcctgtagtcccagctactagggaggctgaggcaggagaatggcatgaacctgggaggtggagcttgcagtgagccaggatcacgccactgcactccagcctgggggacagagtgagactccatctcaaaaaaaaaaaaaaaaaaaaaaattaaggctgagcacaatgactcacacctgtagtcctagcactttgggaggctgaggtgcaaggatcacttgagcccagtagttaaagaacatcttgggcaacatagtgagatgccatctctatttaaaagaaaaaaaaattttaaaaatgtaaaaattaaattgaaaaatgggatttttttcaaggagaaaaattaggatttttgtttgctttgttttgttttaggagataaggttttgccatgttgtccaaactcatctccaatgatccatccacaaagtgctgggattacaaatgtgcaccaccgcgcgtggtggccccttttttttttttcatgacggagtctccttctgtcgcccaggctggagtgcagtggcacaatatgatcttggctcactgcaagctccgtctcccgtgctcatgccattctcctgcctcagcctcccgagtagctgggactataggtgcccaccaccacacccagctaattttttgtatttttagtagagacagggtttcaccgtgttagccaggatggtctcaatcttctgacctcgtgatccgcccgcctcagcctcccaaagtgctgggattacaggcgtgagccaccgcgcccggatttttttttcttttttaaagagcgacaggttcttgccatgctgcccaggctggagtgcagtggtgtgatcacagttcactgcagcctcgacctcccagactcaagcaatctcctgcctcagcccttaagtaggtggaactatatgcgtgcacctcctcacctagctaatgtttgtactttttgtagagctagggggttctccctatgttgcccaggctggtctcaaactccttgcctcaagatatcctcccgccttggcccccgaaagcactgggattacaggtgtcagtggcatctcagagtctccctctgtcgcccaggctggagtgcagtgacacaatctcggctcactgcaacctccacctcctcggttcaagtgattcctctgcctcagcctcccgagtagctgggactacaggcgcgtgccaccacgtctggctaatttttgtatttttggtagagacggggtttcaccaccttggccagactgttcccgaactcccaacctcaggtgatccgcctgcctcggcctcccaaagtgctgggattacaggcgtgagccacggggctcagccaaaaactcagtattttgtgactgtagtccctgctgaccccatccctcacccccaccccacatgccagggttcacttacccgtaggaatggccaatgagcacatttcgcttcttggcatagcgcttgaagattgctcgcatgtcctcagccagcgcatagaaggtgtaggctgcggccacctggggcgcagagctggccccgtggccggccaggtcaggagccaccacctcatagcctaggcgcacaaagaagtccagctgctccttccagatggccagggaaccgccgacaccatggatgaaaaagagcaccacgtcggcctgggcgcctttgcagctagtgatgcgcttctcacagtcaatatggatggtcctcttggggcgcctggctcgccgccgccgcccaccactgccactgccgctgccgctgcctgcgctgccgggggccaagcggccatcgctgcccgccggatctgccagctccacctccagggcggccggcggctccccagagccattctgcccgtgtaggaggtcggctcgaggggctcggcccaggttttccaccagcaaccgcccattgcggtacacggtgatccggcgctgacagcggaccaagccggagaggtccccctgggctgcatccgaggatgcggatgatggtggaggtggggcagcggctggggcgggtcctgcatgcttcacccgcagcacgcggccgggcttgacctctacaaaggtgtagccatcgctggactcgacgctctccagtggccccacggcgttggggggcgtgcccagcaggcaacagaagataccgtcggtcaccccggtcagcatggtgtgtcctgtgagtgaggacagcagccagttcaggtgctgtctcaatgagaaccctgcaccgtgcagcaggcactccctgagccttgggagaactgttttagactccagtttggggagcgccagatcaagtgagccacggcactgagatttttttgtttgtgtgtgtgtgtgtgtgtgtgtgtgtgtgtgtttttgagacagtctcgctttgtcatccaggctggagggcagtggccggatttcggcttactgcaacctccccctcctgggttcaagcgattctcttgcctcagcctcctgagtagctgggattataggcaggtgccaccatgtctagctaatttttgtattttttgtagagatggggtttcaccatgttggccaggctggtcttgaactcctgacctcaaattttcctcctgcttcggcctcccaaagtgctgggattataggtgtgagccaccgtgcactgacatgttttgtctgagcagtgcctttgtggtagttaccctcctgggtcaccctagtctatcctcagagagaaagacttggctatggcttaccccacagggtgtccacagggaaggtggtggcgtcttgtgtggggatgttcctggagaaggggacattgtggcaaatgtggaccagccggaagacaccccctccccccagctggagtttataccatttatggcctcctaactcattcattcaggtatacactaactcatccattcaggtatacactaactcattcattcaggtatacactaactcactaactcatccaggtatgcactcactaactcacatatccccagggcctcctaaggcatctaaaatatgcaaatctttggtgagcccccagtgaggctcctggctctgaatttgactcctgaaaggtgaggccctaggagagggggatggggactgagccacagaaagccttgctcagctcccctagaccggggtgagccggggtctgtttcatagagggccaagctgaggcccagacactctgagaggaagctagactctgaacttcctccttggcaccctggattctggggatctgctatacaagtccccagaggtggcgaagaggatgggagaggcagggccctggctgggggcctccaagcctccatcccactccttgggccacccccgcccccgtgtccatggcaaccacaggcggttacataacctaagggggggatacccgagcagtgcacccccattgtcgaggtgtctagggcctggagatgggaccagctgcctgcctgccccctaccccaggttgggcgccgctaaggtaacgcacgcccgagactgagccgcagtggccccagacatactggaggggaagcaggccatgccccccacctcgagtggggccctaatcccggattgtggagggcaacgcacaggcgccaccccagccccgcttccccgcccccggcccccgccttccaggtgttcgtcatccctgcagcggggtcgagcccactggggctccgtggcttcctacgagcccaaacgcggggttggtggacaccactcctccgaagtggaggccccggggcttcgatctctccttttggggcccgttccccgctcacctcatcgagggccgcggggcccgggtcggggcggaggggtcccaggcggagaagccagcgtccgcctgctggcgccgtttacatggtggcgcggggtcaggccgggtgcgtctacgcgggcgggcacctgcccctggcggtcagcgcaggggcatcccgcggccgccgaaacagccggccctttaagttcctcccccgagtaggcggagccacgtgccgacgggcgggcacttcggcctatcgcagctgcggactgacctggcctagttaggagcccaatgagaggcggcaattccgtagtggaggcgggctctgggagcaacggccccgccccttttgggggttcaccgaggttgggggagggatggggcctggctcaaggcggagaagggggttgcagtctagggtctgcgggacgcctgggagtgtgcggccggggccctctctctgcaaatgggtctcccaagcccttgccccccagcccctgcctcccaattgccctgttcctctccaaacgaggcccccatactcttctctctgtattgacctttccattctagaagcagagactccaagatctttttccaatctccggtggggaaactgaggctcataaagggcacaagagcataaatcaagcaaggagcaaagctgggacttgaacccaaggctgtgtgattccaaaccctgggaaccattatttgctaacctcccccctacgccccccccttttcttttggtagggacgaggtctcgctatcttgcccagactggtctcgaactctgggcatcaagcaatcctctcgtctacggcctcccaaagggctgagatcactggcgtgagccatcgtgacgggcttctctaaagctttcaaggaaagtcttggagctgtgggtaattagagagtttgaatttcataatcagccgatttaacccatggctgccatggttctgagaagggctgatagcaagaggcaggcatcccagctctgtggtaccggcggggccatggtaggccctcaggagagctcaggtctcaaatccagcctctgccctttgctgatgtgtgacctcgggcaagttacttcactttcctgagcctccgtttatttctctatgaaattaatcctctcataagtttgctacgcaggtaaagcactcatcatagtgtcgtgcatataacaaatgctccatatattatgggcattattatagtggtgatgttttgctaaacgatgctacaggtaggatgggcttcggaggacgaggggttaaatgctccttgctgcttggccactcacatcccctggaatttgctgccagagctggattccgtccagacacctactcttgcccactaagggcacttctgggagactatacagtttattcatttagcaaacacctctctgcatgaaccccaagctggcacttgtagggatacagccccaggcccctggcccttgaggagcccttgaacttgggggagagtcaagggaaagcagtcgggccagaagaatggacagcggttgagagaagacgactccttttttttttgagaaaggatctcactccgttgcccaggctgcagtgcattggcgctatcattgctcactacagcctggatctcctgggttcagggaatcctcccacctcaccttcaagtacttgagactataggtggttgctaccatgtccccaggctggtctcaaactcctggccccaagggatcctccctcctcagcctcccaaaatgctggaattacaggcatgagccacacctcactcagcccttggagaggaaaggatttttaaagggcggataggggaacaccaggcagagaggagagtgtggctgaaatgtaagatggtgtgtgtagagggttttgcatgcctgatggaagggctgagcaggttttacctggggaaatggggagccaaggatagtgtgtgagtaggggaggggttcagatctgagtatcagaaaatttttcttccttttttttttttttttttttggttctaacaacagaggagaattcttctagggcccaaaatgggggcaagattgccaaagacaagcttgcaatccctgagtttacagattgagaaagcccagagtggcgcagggaccaccccaaggacacgcagcgagcttgaactcaggcctcctcggcttcctgccaagaggcggagacttggctgcagccaggacaagctgccagccagctgtgtgccatctgcccagctcccgctgggggcgggaagaccaaccagccgcttcctgcagctgccaccagctgcgcccggccaccgcggggcaccctctgccggtcaataggagagagaactacagctcagctgccagctgaccgcgggagataatgccttgtgcgcacgcgcttgctcagaaggcgccgttcgccggctacctgttggtgtgtatgcagagcatccctgtgccccgcggatatagactggcgcgcctctgttgcgcaggcgcagaactacaacttcagggttttccccaacggcctcttttttgcacgttaggagaaactacatttcccataatcctttgttccagggctggagcggctctgggctccggaatcgcccgcagccggtactgcgggacccactgcggatatggctgtcttggctggatccctgttgggccccacgagtaggtcggcagcgttgctgggtggcaggtaagtcctcagggggacccttccccaaatcagggaataagggcggcttcggaggctggcgccactcttcactgcccgcgtgacctgccagtgccttgcgcattttgcagccaggctctgtctccgggagccgaggctcagagaggttgagcgccaaggtcacccagcgccccgtctgacctttctcgccgtccctctacccacgcaggtggctccagccccgggcctggctggggttcccagacgcctggggcctccccaccccgcagcaggcccggggcaaggctcgcgggaatgagtatcagccgagcaacatcaaacgcaagaacaagcacggctgggtccggcgcctgagcacgccggccggcgtgcaggtcatccttcgccgaatgctcaagggccgcaagtcgctgagccattgaggatcgcgacgcagtcggcgggaccctcatggaagcatcgccctcgcctcggaccttgcctggcgctatttttgcagggagctggggagcaggaacgcctcggacctgagtgctctccatattgtggggttgaagtctggatgggagcttgccaagtccctttttaggctttttaattaggaagcatttcgaacctgcgcaacagaccaaagaacagtacaaagaacatccgtgtacccagtaccctgactaccgactacctacaacccgtccctgccccatcctgagttcttttgaagctgatctcaggcatcggattatttcttctgtaaatatttcagaatgtatctctccaagatgagagctcattaaaagacaattacaaagcttatcacatccaaaagaattatcaataattttgaaatattattaaacgtgtaataaatgttcaaagttccacttgccttatatgtgtcataactcttttttttttttgagacagtttcccttttgttgcccaggttggagtgcaatggggggatctcggctcattaaaacctccgccttgcgggttcaagcgattctcctgcctcaccctcccgagtagctgggattacaggcatgcgccaccacgcccggctaattttgtatttttagtagagatggggtttctccatgttggtcaggctggtctcgagctcccgacctcaggtgatccgccctcctctgcctcccaaagtgctgggattacaggcatgaaccactgcgctctgtcccccaggctggagtgcagtggcacgatctcggctcactgcaaactccctctcctgggttcaagcaatctcctgcctcagcctcccgaatagctgggattataggcgcccaccaccacacccggctaatttttgtatttttagtagagacggggtttcaaccatgttggccaggctggtctcgaactcctgacctcaggtgatctgcctgcctcggcctcccaaagtgctgggattacaggtgtgagccgtcatgcccagcctgtgtcataaattttataggtctgggaagactggtggaaaactgtgtgtgtgtgcgggggggtgtttgtttttgaaacagggtctcgctctgtcacccaggctggagtgcagttgtcggatccctgcttactgcaacctctgcctcctgggttcaagcaattctggtgcctcagcctcccaagtagctgggattacaggtgcatgccaccacgcccagctaatttatgtatttttagtagaggggagtttcaccatgttgaccaggctggtcttgaactccagcccataaggagtttgaatcttccacttgtcccttggggatgtttgattttgagcaagaatttaacactgtgaggtgcatttgtcgcctataaaatgcagtgctggtttctcctctgctctgttgctgttggagtaataatacttagtagcttccacttagcaacttcactgtgcaattgctgtgtgctgggtgcccattctttgccctggaagtcaggaaggcagtttggacacagaggtgtcagggctgggagggggattgtgagggctgtaggacttcagggaaggtacctgacttgcctttttgaagaatgcagtcagggaagtcttggaggaaatggcaaggtctgggagagcccagacatagaaggaattggttagaggtgaggacacaggtgggcaatgaagaccgcaggtgcccataaatggggccaaggaggtgggattgaatactagggagttacgggaggtggttgagcaagacggtgtcgaggaggagctagggagtgttatggttcttatcttctagggctgctttaaaaacgtaataaacacaagaagatgccggcacgatggctcccagaactttgggaagccaagtctggaggattgcttgaggccagaagttcgagaccagcttgggaaacatagcaagacccctgtgtcttttttttttttttcttttgagagggagtttagctcttgttgcccagactggactgtagtggcttaatctcggctgactgacacctccgccttctggttttaagcgattctcctgcctcagcctcttgagtagctgggatgacaggcgcccgccaccacgcccggctaatttttgtattttagtagagatggggtttcaccatgttggccaggctggtctcaaactcctgacctcgtgatccgcccgcctcggcttcccaaagtgctgggattgctgggattacaggcgtgagccaccgtgccccgcctttttttttttgagacagagtctccctctgtccgccaggctggagtgcagtggcgcgatctcagctcactgcaagatccgcctcactcacggttcacgccgttgtcctgcttcggcctccggagtagctgggactacaggcgtccgccaccacgcccggctaattttttgtatttttagtagagacgtggtttcaccgtgttagccaggacggtctcgatctcctgacctcgtgatccacccgcgtcggcctcccaaagtgctgggattacaggcgtgagccactgcgcccggctggctttttttttttttttttgagactgattttcgctcttgttgcccaggctggagtgcaatggcacgatcttggctcactgcaacctccgcctcccgggttcaagtgattctcctgcctcagcctccctactagctggaattacaggcgcagagatggggtttcaccatgctggccaggctggtctcgaactgctgacctcaggcgatctacccgcctcggcctcccaaagtgctaagattacaggagtgagccaccgcacccggccgaacctcgcatcttaaaaacacacagacacacaaaagctctagagagcctcgcggagctgtaaactacagctcccaagagacttcgcggccgaggcctccgcccacttccggatctcactttcattgcttccaagtaccgggaggtgctttgcttcttcaaccgaacttgaccacaatgggaggaggcgtggcaaccaatgggcgcatgagttagctggatgcggccaatggaagcgtgcaaagcgctcctatgtgggggcggggctagactgcacaccaatgacagggaggtggtggcgccatcagtgtgggctgtgccgtggctggaagttactgtgaggcggcggctaagaaggcggctctggtggcggcggtggaggctgaggcggcggccgaggcggcgacggaggaaacagaagatggtgaggatggcctccaggcccccactccccctctgctagacaaaatggcgctgtggtcccacccacctctagtatccccctaggcccctctccgttctgcccggtcccctcaggtccggcccgcccctcccactcacctgtgaccttcgacccccggaccctaccgagagcttcctgctgatcccactgccactccttctccgacccctgaccccatccaggataccaagccctgacaactcattcatttccgggttgcggctccccccggaaatcgtctggggtggggatggggtcccgtaagaccccctggtctggcctcgttctcagcacgccggacctggatctcttcagttcaggagaatttgggaggccggcctgggccccggggcgggggagggggcttggcaccgcgatatgcagggctttgtcgccaaaggaagtgcgacatcgccgattgtcccggttccccgggccctgaccccacctccaccattctgggcccttacccgcctctaagaatgaaaaacttttatctccgatccgcatggattgtccctgtgaaatgagggtagcagtagtctgaacctcttagggtggtgacaatttaggtaactgacgtcgtaaaggactcaggatagtgaatgctcaacagatgagctgggtgactcgaggccagtgacgttctcttctagctgtcccctcattatgaagtgtggatcgtccccacctggctgttggaaggttgaaattccttcagggttcctcagtcatcctggaatttgggtctggtggttcttcggggttcagtctccccacctgaaaagtgggatggtgacccaccctcagagtggaactaaagcctctccacaacccccattagttggcatcctgagggctgggaagggtgatgggaagcttggtcaagatacctcaagtctcctttgtcccctgacccagagtcccagcccacaatccacagtccttgggatgtggtggggatgaaaggaagactccctttcaggaaggaaatgggaaggtgggttcctagtgtgcgggtccccaagcctgggagttgtccttgataccttggtacagtctcatccctacagccaatcataagtggattagattgtctctgccttctgaacacacctgaattcatccatggcttcatgccctgttgcaggtactgccacttcccacctgcatacctgtcccagcttcttccctggtctcctagccttgctctcacccctttggcagttcataattcacctgaaccagaaggaactttttttttggagtcagggtctcactctggcgcccagactggaggctcaagagatccccacaccaggctcatttttgtactttttggagagatggggattccctatgttgcccaggctggtctcaaactcctgggctcaagtgatcctgcctcagcctcccaaagtgctggtattacaggtgtgaggcactgcatggggcctgagaaggaggttgttttttttttttcttttgagatggagtcttgctctgtcgcccaggctggagtgcagtggcatgatctcggctcactggaacctccgcctcctgggttcaagccattctcctgcctcagcctcccaagtaggtgggacccaccaccatgcccggctaatttttgtatttctagtagagacaggttttcaccatattggccaggctggtcttgaactcctgaccttgtgatccacccgcttcggactcccaaagtgctgggagtacaggtgtgagccactgcgcccggccagaaggagcttttaaagatgtgcatcaaatgataccactttctagcctataaaatgctccaggaaccctggcggctcccctcctcaccctgaggcccctggccacctctatgaccttatctccactctcttctccactctgtctgtgagcttcagccaccctggccttgttttcacttcctcacactccaggttcctgctaccccagggcctttacacctgctgctctttctgctcggaacactcttcctcctgtgatcgaggtcattcctgactttggggggcccccagttctctgctattagtgtactgcttctctttctcatctctttgttgggtctctggcaggctacctgcagtgggactggcacacaggtgtccagtgcgtgtctgctgaggcacctgtgagggcccagccgtggctggcatttgtctggaatgaggcctcccccaccccctgcccccatgtctcgaggccttgttttccagcttagcatgacaggaaggctgcacgtaccctgccttcattcatttgtccaacgcagacatgttgatcctaaaggctgcccctgagggagctctgtgcaaagcattccccttgttgtcttatgactcagagtaaccctgggaggtggccctgttggaatgcgtctcttcacagggaggcccagaggctgggaagtccctcgtcccaggtcacacaaccagggacgggctaagccaggattgagagcagaatgcccggagtacctgcacctctcgccactcagccaccgggccctgtgtgagcccggccagggttcagtcagccctgtcctgtcctcttcccttggggaggtaccagtccagccagggaggtggacatgtaagcagatgacctcgccggggtgtgagggaggctctgggagaggctcccgaagtgtcgggggaacaaaggggccagggagggtgttggagctggtggggaggttagcaggtatttgccacatggaggcatgaggggcattcctagagggtgtgtgtggcagagggtgtgtatgatgggagtccagcaggggcaagctgggccagggctgcgaagggggacagggacccctcctcacccttcaggtctcagtgcctgcatccctgcgtctgggcagccctcctttatcccctaaatgggccagagctctgccttgcacctcacactgcgccctcgaggcaccctgtcctgcagccgcttcctgtgcactgtgcagctctttgccccacaccatctcaaggccaggcgcgtggccatggtggctcagtccagtgccctggtgcctgctagggccccagaagaccttgctgaatgaatgaagctggccccagagccgggtgctgagctgaggctggcatcctagggtgggaggggaggcaggtttgagggactttgaacaggtcctggggcagtaggtcatccagatgtgacggctgcctcccgggtgggagggggaggcccacccagccacattccggcttcccgagagggaccagcagaggaggggccagatgtcatagaattggggacactgctgttcctgcctgtcccagagggtggtgggaaattgtctgaatagcagcttctcccagggcagctctcttgggcctcaggcatcaggggatggccttcccttccagctctgtagcctgcaggggctctggcttttgcttttcaggtgtgtgatgaagagaaggagcttggcttctgaggtggggtacatgtgggttcaaatcagccccctggttttctgactgagactgggtaacctctctgcctcggtgtccttgcctttgatagggagacactacctcctgccccattgggtcaggagatcatacatagtgagctcaggagggccccgttcagggcaagccatgtggagagactcgcagcagacagtcccaccactggcccactccagacctcactcacagggttggattgaaaatggctttttttttttttttttttttttttttgagacagagtctggttccgtctcccaggctggagtgtagtagcacaatcatggctcactgcaacctctgcctcccgagttcaagcgattctccagcctcagcctcccgagtagctgggatcataggcgcgcaccaccacgcccacctaatttttatatttttagtagagatgaggttttgccatgttggccaggctggtctcaaactcctgaccgcagatgatgcgcccgcctcggcctcccaaagtgctgggattcaggcgggagccactgcggtatgacttttaaccagtggcctgttctcttgcagcctcaatttccccacctctcacctaattagggggctgtcatgaggatcccgtgggggatgtgcacatagcctggcctggttacttttctgtggtcccgacagtgtatccagcagccagctcaagggtgtgttctggaaaacttgaactacaaagaatagtgggaagaaggaacccagcagtcaccctgcaggtgctccagggatgagctggcccttgcctgttttctcatgtaccatcttccatgtcttctaggcagattttttgaaaggactgcctgtctacaacaaaagcaattttagtcgatttcacgcggactccgtgtgcaaagcctcggtgagtgcgtgttcctgggactgggaggaattggtcacttccagggggcctgggggcagcttgtgtcccccgattggggtcttggctggaacagaggctgatcttcaagcccagccccatccacatacttgagtgtcttccaatctgcactgaagggtgggtgctgagtggagggatgaggagaccccaggcccatgcactctcctaacccaccccttctcaaccctcctgcagaaccgacggccctcagtctacctgcctacccgcgagtacccgtctgaacagagtaagtggccgctgtcagtctgtcccattctggctgctgaggggcggggtttggtgactgcagcgtggcacgcggaggttatcttcaaccccggcccaggccatagacttggcttgggttcacacgctgtctactgaatccagttaagtcagggagggcctccagggaggtacaggagggggaccttgggggcttcagcctggggatgcacacgtggatgcctgtccactcccagcccctggggacagccagaaacctggctttccccaggtgtctcttgattgggacacactgggatccacagccagcccaaaggggcccccaagttgtccctcatctgccactcactggtcctttcccctccctgtcagatgaggtcaagcgagaactctggttctaagacaagtgctatcgggcagagaggcagcagagggctacaggggcttgggctggggatccagccaagcctgggtggcagtgatgggaagggggtccaggcaaaggggcccacagcacaggaggacttggtcttgctgtcttagtttaactgttcaaaaagactccacaccaggtggggtagctcccgcctgtaatcccagcactttgggaggctgaggcaggaggattgcttgaggccaggagttcgagaccagcctgagcaacatagttagaccctgtttcaccaaaaaccatatatatacgtatatatacacacatatatatacacacacgtatatatacacacatatatatacacacacgtatatatacacacgtgtatatacacacacgtgtatacacacacgtgtatacacacgtgtatatacacacacgtgtatacacacacacgtgtatatacacacacgtgtatatacacacacgtgtatatacacacactatatatatacacacgtgtatatatatacacgctatatatatacacacgtatatatatacacgctatatatatacgctatatatatacacacgtatatatatacacactatatatatacatacgtgtgtgtgtgtgtgtgtgcatatatatatatatatatatatatattagccgggcgtggtggcatgcatctatagtcccaggtgggaaaatcagttgagcccaggagctccaggctgcagtgagctatgattattccagcctgggtgacaagagtgagaccctgctcttaaagcatttatccatctggagcctgtggggtgggactgtgtggtcactgggcacagatatgcggtatgtgctcctagtcagcctgggagaaacataggcatgagagtctcagttgcggggcttggtcccccaccaagggtggaatcccttgcagggagccgggaccctgaaagcagctggctcaggcctctgggagtagctgcgagtgtgctcagaagcaaaaacatgggacttttggagatctctggagttgggggtactgagttccagccccaaaaagacctcccagggcagtgtcaggggaggagcctggggaggggaggcgtctgcgactttctctatctttcctccttagtcatcgtgacagaaaagacaaacatcctcctgcgctacctgcatcagcaatgggacaaaaaggtgaggcccacagggctctggtgcagggattgtgggtggacagagactgggcacctggcaggggcttctgagcacaggaaggactctagtgattggagcagggccttgagggctgggtaggagtgccctgggcgatccaggagagggaagagcgttccagtggagggaaccgctgtgcagaggccacaggacaccagtgctcaggaggctggaggccaggcccaagtagccgccaggcccagttttccatggctctggcattaggtagactgtattggtatgaactagatagaatattttctgaggccgagtgtggtgacgcatgcctgtagtcccagcgctttgggaggctgaggcgggcggatcacgaggtcaggagatcgagaccatcgtggccaacatggggaaatcccgtctctactaaaaatacaaaaattagctgggcgtggtggcacgtgactgtaatcccagctacttgggaggctgaggcaggagaatcgcttgaaccagggaggcggaggttgcagtgagccgagattgcaccactgcactccagccttgttgacagagcaagactgtctcaagaaaataaaaaaaggccgggtgaggtggctcacgcctgtaatcccagcactttgggaggccaaggtgggcagatcatgaggtcaggagatcgagaccatcctggctaacatagtaaaaccctgtctctactaaaaaatacaaaaaaaaattagccaggtatgctggtgggcgcctgtagtcccagcttcttgggaggctgaggcaggagaatggtgtgaacctgggaggcggagcttgcagtgagcctagatagggccactgcattccagcctgggcaacagagcgagactccatctcaaaaaaaacaaaaaaaacaaaaaatcttttctgaatggtgaaatgtgtacacatgattaaaaatctcagctgggcgtggtggctcacacctgtaatccccgcgctttgggaggcctacgcaggcggatcacgaggtcagaagtttgagaccagcctggccagcatggtgaaaccccatctctactaataatacaaaaattagctgggcatggtggcgcacgcctgtaatcccagctactccggaggctgaggcagaagaatggcttgaacctgggaggcagagattgcagtgagccaagatcatgccactgcactgcagcctgggcggtctcaagaaaaaaagaaatctataccgggcgcggtggctcatgcctgtaatctcaggactttgggaggccgagtcaggcagaccatgaggtcaggagatcgagaccatcctggctaacacggtgaaaccccgtctctactaaaaatacaaaaaattagccgcgtagctgggtgtggcggcgggtgcctgtagtcccagctacttgggaggctgaggcgggagaatggtgtgaacccaggaggtggagcttgcagtgagctgaaattgcaccactgcactccagcctgggcgacagagctagactccatctcaaaaaaagaaaaaaagaaatctaggtaacatgtgagggtgtggctgggtgtggtgattcacacccggaactgcctgagaggctgacgcaagcagatggcttgaggccaggagtttgagaccagtctaggcaacacagcaaaactccatcactaaaaaaaaaaaaaaaaaaaacaaattagctggctgtggcatgttcctgtaatcccagctattcaggaggctgaggtgggaggatcgcttgagcccaggaggttgaggctgcagtgaatcatgatcatgccattgcactccagcctgggcaacagaaccagactctgtctctagaaaataaaaataagagggtgtagttgcagcgaagagtcatctcccgcctcccgcttctggtgccccagctcccttcccagaggctgcctctgcacacgggatatttttcttctttttctttttcgtttttcattttcttttgccctgccctgccctgcccttcccctcttttcccctttttttccccctttttcctttcctagatgaggtcttgctctgtcacccaggctggagtcgcccaggctggagtgcagtggcgtgatctcggctcactgtaacctcctcctcccagtctccacctcccaggttcaagcaattctcctgcctcagactcctgagtaggtgggattacaggcacgcgccaccatgcccagctaatttattttattttatttatttatttttttgagatggaggtttgctcttgttgcccagactggcgtgcagtggcgcgatcttggctcactgtaatctccgcctcctgggttcaagcgattctcctgcctcagcctcccgagtagctgggattacaggcatgtgccaccatgcctgattaattttgtatttttagtagaggcggggtttctcgatgttagtctgacttgtcttgaactcccgacctcaggtgatccacccgccttggcctcccaaaatgctgggattacaggtgtgagccaccatgcctggcctaatttttgtatttttagtagagacagggtttctccatgttggccaggctagtctcgaactcctgacttgaagtgatccacccacctcggcctcccaaagtgctgggattacaggtgtgagccaccgcgcctggccttctttttttttttggagacggagtctctctgttgcccaggctggagtgagtgcagtggcgtgatctcagctcactgcaacctccgcctcttgggttcaagcaattcttctgcctcagcctccagagtagctgggattacaggcatgagccaccgcgcctggcaagtttgttttttttttttttacctaacattgaacagtgggtggctgcctaccctgcgcaaagttggaaggtcgggggactgtgtggcaaagtgactgcttctgaaaatccaagctgctgggcccacccccaccccttctcctgccccccaggacttggtttccacagcggggaaggaggcgtgtgcttctgtcttgcgttgatgtgcggcatccccagtggcttccaaaggccctttattcccaggctgggtgggttgctcctctgagtgcttgagaaaccagccctgtgtgggtcattgcatgtggtgggggtgactccgggtgccaggaaacacctgtctatcaccaggcatgggtccagaaagtgctctgggcagggcttagtggggcaggtcctggtggtaggaggggctgcctagccagggaccctggggccccccactgtactccaggcctacctctgtgatgctgctgcaggggcctgggctggcattatgactctgggagcttcacccacgtgaagactcacagcctccagctgggcaacatagtgaaacccccatgtctaccaaaagtaaaaatattaagcgtggtggtatgtgcctgtagtcctagctactccagaggctgagctgggaggattgcttgagcccagaaggttgaggctgtccgaaaaaaaagactcacagcccctctcttttccctgtcccccagaacgctgccaagaagagagaccaggagcaagtggagctggaaggcgagagctccgcacctccccgcaaggtggcgcggaccgacagcccagacatgcacgaggacacttaagactctcaactccacaggcgcctcctgccaggtctgctcctcggtcgcccacccgcctgcccgccatgtgtaagcaccccgcccgcccgcctccctgccggcccatccacaccctgcgtccacaccacttccaacctcataggagccgatgtatttattttccttgagtttttatttatgctgtaacctgtatcaagcgttggttaaaggggacatcagacccagtagtgtgatgttggtagatgctttttaaaaaaaacaacattgtccccccgacccccgccttccatcgggccagttccccgattcctgcccccagttctccagagaaccagagtgtgtctgtgagagtctctagcgggggctttactgtggccgggcgacaggggcgggcccggggtggcctgacctaccaggacagccgagtggccttctcccccccaacaccggtccaggccattgagactcggtcttgtcccacgcttcgcccggaactttcccatgcccaggcctcactcagcgtgcacgcacgttggggagaagtcggcccttgggatctttctcttgagtcattttatttttatcatggactagtgcgtgctccgtgtccaccccaataaaagggtctttcctacttgacctcgcgtctttgctccacacaccttggctgcagaggacggagcccctgggagtcatccctgttgtcaccaagaggagtgagaagggccccccacgccaggggccccaggaccggctggattctctcgtgggcttgctgaggccaccatgttcaaggccaagacctgcctggaccatcccctctgcctctcctgtcaaggtgaccccaaggacaggtcattcctgagagacggtccatggtgccaaggatggagcggggtcagccccctgcctgggataccgccaagcagggcagcgcacctgtcagacaccgcagagatggccggcctcatccgggggcctggggtctctggcctctgctgctcccctgaggcatggtgacagtacagacggcatctggccggtcttgctgtcctaggtggtggcctcacccttgctgggtcatagaggagctgtacagaaggttggcacctggcagttggcatgtgccatggccgctcatggggacccctcttccgccagctgggctgggtttggggctgagcttgggtatgtaggggtgttcgggctctgggcagaaggtttgtggccctgaccactgagcctggggctgggggaacaccgcttctccccttattgcccccactggtggtggtggggatctcagttttcttttgttttgttttgtttgtttgtttgagttggggtcttgtactctttcccaggctggagtgcagtggcgtaatcacagctcactgcagcctcgacctcaagccttcctcccacctcagccttccaagccgctgggaccacaggcacccaccaccatgcctggctaatttttttttttttttgagatggagtctcgctgtgtctcccaggctggagtgcagtggcaagatctcagctcactacaacctctgcctcccaggttcaagtgattctcctacctcagcctcctgagtagctgggattacacgcgtgcgcccctacacccagctaatttttctatttttagtggagacggcgttttgtcatgttggccaggctggtctcgaactcctgacctcaggtgcttcgcctgcctcggcctcccaaagtgctgtgaccgcacctggctgcctggctaatattttaaaaattttttgtagagacagggtttcaccatgttgcccaggctggtctcaaactcctgggctcaagtcatccaccttcctcagcctcccaaagtgctggggttacagacgtgaaccaccgtgcctggcagaggtctctgttttgagagctgagtctgagggcgttgggatggtgtagggttgggccacagagctagcagacactccgggctatggagggtccgcctgccccagattccactgtggagggccctgcctgtgtcagaccctcgggcctaggcggcccatctctcccaaggacggagagtgccagggtgggctcccgtcctacacaaggagtggctgaccaggcccaggcacagcacagccaccctgctgtacctcccagctcccggcagtgtctacaccacagtgatggtgctacaggggccatgtggtcacaggacaggtggtcaggaaatgcacacttgactgcggtcgatggtgccgggtccggctgaatgccctggaggctcccaggccagctggggagtcccagtccccagggttggtgtgacctgggcaggcctgcggtgtccatctgtgaatgactgagatggtgggacttcagcttccaaggccaggggccagagtgggagcagggggcactcccgcctttcccctcggcctgtctagacctctctggctcccagtttctgctttgagtggctgggggctgtctcctgcctgtgctgtctgcccgtcgctctgcagggctgctgggcgggcacctccttcccctcccctacctcagctccctcctttggggtctgagggctgtgccccagcttgcctccctgtggcctccccctagaacccctgggtctgtcgggacatgccccacctggcacacacaccctgtgtagctcccactgcctgtgggaggacgctgggcccctgagccggcctctgtctacccctcctgcctttggggtcccctttaccccactgttcccccaaactgccttccaccttctccgcctttgcacaggctgttctcctgcctccagtgaactctgacttctccacagcctcccaaagggccccttgctcacactggcccagccctgcagcatggccatgttggtctctgagccttaagcctttggatgtggacacatttgtcctcttcctgaaaaatgtgagggtctgagaggccacgttcctgttcctgagtcatacgacagagtcccagtgacttgggtctgatgtctgtcccacagtgggacatccctgctgcatcccaatgccaccccgtgtcctggggacacccaaatgtgccattctctcagtatcacaagtcggggactgcaggaggctcaggtgccaggtgccttctgatgttcatgccacaagctcttcccactgtctctggctccccagacgatgttccaggaggcgggtgtgccagaaggggccacgtcttgcaaaccaccgcgctgtcctctttgagaaggagtcttactcaggactggggcctgtgcacacattgtcgcctcttttcagcacttagagattccttcctttgtctagtggctgaagccagggctgaagttggcctccaaatctgggccgtctcagaggcggcgcagcctggagttttccatctgtggccaagacccagtttttgggaggaggccctcatgggtcaagccagcctgtaccaggatggggggagggggttcccaacctaggccccagccacccagactcccccacccccactcccttttccactgctctgacctcgggcactgttgaaatatagtttttattgcatttctgccgttttacaaaaatatgacaaaataaattaaaaacaaataaataatcgcctgttctgtgtgtgtgtgtgtgtgtgtgtgtgtgtgtgttttctgttggatttgtgggtttcctttcgtttggaaaggaaaacggcagatggggggcaccgaccaatactgggggccctcgggggctgaagcgcattttgcattttggagaccggccgcccctgtgaatgactgatattgcatatgagaagagaaggcagggcgggtagagctaatgccagccgctgggccagcacacggcctgggggctggggctggggctaggggagggcgctggggtctcgaggggatccgaggtgggcggtagcggtgggggcgggaggctgtaaaagctggcgtctcccggcaggggctggggggcgggtgggggcccggccatggcacagggtgggcactcggcagcggccagggcctggcggggggcggcaccctcgcccccgcagccccagggcccgtcccactgccagcagcctgcgggcggtgtcgggggccggggcagcggcattggcggcggcggcgcggggctccggctgcggcgggtgcggagggcaggggcgcccacgggggccagcgctgtccctgcggaggcgagaggggccgttccggggggatgccgcccccgccggaccccgccgggctggcaaccctgcccgcgctccctcccgggcatccaggcacataaaggccttattgcttctgatcagagactgaggtggggcggccccctgggcggcttccggtgcataccctgcctctgggcacggccctgccggtcacagggggaggacagtttgaggaagtccctctggcttctgacctatggcccttgtgctgcagctgccacctgttgggctccctgggaatggggttgctggagcccaggctgggattggggcaggggaggtggtgggggtgggagggtaggggtgaggcctgcacctctgctcagcacatgtgggagctccctgggtgggcagccccagccccacctcgaggaaggccttcctgaacagctgggctgcagggtgtggatttgcatagaggcctggggggtcaagtcccccccaagagtgagctggagcaggagaagggtgggctggttgggaaacaggcctccctcatctctcctggcaccggagcatggtgggggtccctgggtgcagtcctgggacaaggggctttggcatccctccctggggagggtcaggcacggggctccaggctaacaaaggccctggagatactaagcaggctttaactgagaggctccacgtaccactgacccaggtccccaccaggacctaagaccgggcttcccctgtccccttcagcccctctccccaggcctggccaccctaccctatccccaaagccggcccggcgtccccacccccgagttaaagcttgtgacctgagccttcctcttcgggccggggggcttccagctcctcagccagggcctcgtccaccggcccactcctctgaacccggctgctgccactgctgggggtcccatctggccgggcctgcccgcccgccccgttggacccaggctcagcccgggtgccaccaaaggggaagagcttgccagcatggaaggctttgggcggtgagtggctgcgctcagagtcccgccgggtctcgggtgacttgaggaacttgaagctgaggaaggcaggcaggcgggtgtcgctgcctgtgggtgactgggcagggggaggccgggtggtggctccggcccctgcagcagccagtgaggatgtggcccctgacgagaggaatttgccctgcagtgggatgatctgcttcaacttcatgacgttgttgggtgccagcagggaccctgggcgcttgggccgttcaggcccgtggccacccgcagtgctgcccttggccttggcagaggccttctcggaggaggtggcagggtccagcccagagccctcggccctcgcctcctctcggccaccagaatcatgctcccgccgggcatggtgctctgcatggcgctgtcgctcctcctcctcccgccgcctgcgctgctgctgctggtagcgatgctgggcctggcgctcgtgtctctgcaggtagagccaagccgttacaggactaagaagaaagggtgttagcgggtgccagctgaggctggtgcatgccagggctctctgcaaaagtgggggagacttaaatgcttattaggctccaactgtatccctgcacccacaatgggggctccctgcagaagtgggagagagccaatcacttattgggtgcaaacggcattcccagatacatgatcagcctctctgtggaaatgagggaggcttaaatgcttattggggctgggcgcagtggcttgcgcctgtaatcccagcactttgggaggctgagatgggaggatcacttgaggccaggagttcgagaccagcctggacaaaatggcaaaaccctgtctctaccaaaaatataaaaattagctgagcatggtggcacacgcctgtaattccagctactcggaaggctgaggcaggagaatcgcttgaacccgggagacggaggttgcagtgagctgagattgtgccattgcactccagcctggggacaaagcgagactgtctcaaaaaagagaaaaagaaaaaaagcgtattgggcgccagcttcatctctgggcccacactgaggttctctggggaactggagagagattccgaggcttattgggtgcaactgaatgaatccctggacccacgccggtactttctgggaattgaaaagaaaacaaacattcactggccatcaactctgtccccggctgtgtgccagacagcgtcttaggaattggtaaagtggaaaccaatcctgagcctcaaccgatcccctgcttcccagagaacaggcaagagacagaaccgtggctgcaggctgggtacggtggctcacgcctataatcccagcactttgggaggtgggcagattgcttgaggttaggagttggagaccagcctggccaacatggtgaaaccccatctctattaaaaatagaaaaattagccaggcgtggtgggacatgcctgtaatcccagctatttgggaggcatgagaattgcttaaacctgggaggtggagattgcggtgagccgagattgtgccactgcactccatgcactccagcctggatgacagagtgagagagattctgtctcaaagaaaaaacaaaaacaaaaacaaaaaggactatggctgcagcagactatacccaggtagccacgcgaggctctgttcaataaaataaaaattcagtttctcggtcgcagcagctgcacttcaacgtgctcacttatcacctgtagctaaaggctgcagggacagtgcagacaaaggacattgtcatcctcgaggaatgttccctgtgcaggcactggggagctccttggcccattctgtagctttctgaggaatgcggaagaagctgcgcttctaggaagcctccgctgtgtccctggccccctaacaggatgcaatcgggcaagctggtggatggctgaaggttctgaagggccagcctcgtgctggatgctgccaggattccagaagcgactggacccgttgtgaacactagttattattgcttattattactctttttagagacagggtcttgctccatcacccaggctggagtgcagtggcgcaatcatagctagctgcagcctcaaactcctgggctcaagcgatcctcccactttggcctcccaaagcgctgggatcataggagtgagccactgcacccagccagggagcactaattattatacccagctctgtgcagtctctgcatttgcccttacgctaaggaattggccaccaagatcagagatccaccagcagccccaccaatgagaaaaccgagcccagcctggcccccctaccttaaaggcctcgcggcgctggtactccagcttggccatttcctcggccacccagcccgggatatcggggatggccacgtggatgaggtacttgaggagcagagcgaagtgctgcaggggtggcagagaggaggctgcaggctgcagacgctggggccgccctctcgcctcccagctgcccccgcccctgtcgccggccccacctcgagcactaccaccgacacgatggctgcctccgggctcagccaggggaagaggcgctgcagctgcccgcactggccgattaagtagcagttgaccacaatcgctaggacacccatggcctccatcaccttctgcagggcggcaggagggctcaggcggggtccagccggcctccccagaccccaggctcctcccagctgcacctgggctccctctgggcctcagctcggatctcttggcttccccccacctgccactggccgatgctttccacgcgctggccgaagggccgctgcagcccggtgcacagcttgaaggcgtcgctgcggatctcaatgaggttgttgaccagggcgcacagcgccgccagggggaaggcggacgagaagagcacaacgtagccgaactgcacgaacatctcctggtagtcctggaacgtgtcctgcgagtgggcgggcctcagacctggaagcctcttccctgggacaatctttctcccattgagcccgcctccctcagattatcccatgtggacccagggcctgtccccatcctcagccagcccagaggcttcctgtatctggctaggccttcctctcctgcagcatcccaacatcaatggccctgttatcaccactcccacccccacggccttcaccctcggacggtgtgtcccgtccccggcgaggccccgccccctgcgaggccccgccccctcctcacctcgtacttcttcatacagctctccagctctgcctgggtgagctggggcgagtgttcctcctccggcgggtcaatccaagacgaccggttctgccgtctctgcctacgggtcgaatcgctgttggagccgggttccgggtccgggcccccgtcgggcccctggtctcggccctcgcccccggcccggcggaacaagatggccgggggctcccgttcagggctgccgggagccccctccgcctcgtcgtcctcctcggccagggtgaacactcccggctccagccccttctccaccatagtggggctcccttcctccaggagggcctccgggcttgggccgggccgacgccgccccgcgccgcgctcagcgaagctgaccttcttcagccggagcccgcagtccaggaggcccccttcctcgccctcctcctcgtcctcctcttcctcctcgtcctcctcctcctcgtcgtcctcgtcctcctccttgccccctggaggcccgtccccctcctccccgccttcccccgcccgccgccgctccaccagcgccgcctcctcctcctcctccggcgccccgcagcccccgctgaggcacctgcggcccccgcccccgctgccgccgcccccgccctcatccgcctggggttcgaggcggcggggcgcagggcgccggaggctcaggaggccaagcagggctcgggccagctcccagacggcccgcaggcccagctcgccgcggcccaggcgccggtacaggtgcggctgcaggacctcgcgcacgttctggaggaactggcgggtgatcagcagcgtggccagcatctgggggcaggaaggggaaggagagaggcgcgtggggggcaagcggggcgccgggatcgggggactcaccctccctgggcgccccgccggagcaccgtgcccagacacacgccgaatccggttcctaactccgctgctttggacgcgcctcgacgcgaggcccccagcgctcagccacaaaatacagcctggcacgcgcagcgctcctcgcccacctcacgggcaggcccagcgcgtctccaccccaccgcgggctctgtcggtgcactgggccgcgtgcgcccccagccgcctgcacctgcttgctggccgcccccgaccccagattccctccgcgcatgcgccctcagctcggcgcgccaggcccccagcacagccacgctgcccaccccggcgaggacccacgggctcgccacctgcccgtactttggcccgggccgcgagcaggaggccccggagggagaggaggagcaggcggaaccgcagggccgcgagcgggaccagcaccgcctgcagctgccgctcgaggctctgggacagggacaggacgagcaggagctgtgaagggaccgacggacagatggacggacagatggggggacgacaggcagagagaggacgcacagacgacggacaacggacggacagacaggagagaaggatggaggaggggagggaggggctggagagcccttggaccccttgtgccgggtctggcccctcgctggccgccatgggggcaggggggactgccgctggggcgggggtctcacctctttcaagcgctccatgtccttgaggtagaaaccgatgtagaagaggctcaggtacgagttgacaaactggaactgcaggaaggaggcaggcggtggtcatcctgcacccccacccgactccttggagccttccttgtgccccatacagacggcacagcttccccgttgtccccctgcctgtccgatggtggtgactcaccaggacaactttgatgatgaggtgcttctcataggcgctctccagccggtaattttctaggggccaagggggggagtgagggggcagccgcggtccccccaagggtggcagggatcccaaggggcagtggagaccttcctcccagagaccccctggcaggtcgtacccatgtcattgagccagatggctagcttcttgtagccctcggcactcacactgacaagcagggccagcatgaccttaggcaggaatcgggcgagacggggcaaccccttcacgctcagcaccagctcctgcgggagaagggggttcagggctcatcccagctgcagggctcagcccaaggtggagctaggtaccaaggacagggcgggtgagggtatggggggtcacctgcagctggaagcagccaagcatgagcaagaagacacagacgaggcacgccaggcacagggggaggctcacaagcagctggaagagcagccgcttccagggcgggtagtagaactcctcggcccgcgtgatggggctgatacgtcgcacgccctgatggtgggcaaagaccgggcccagcatgagctcagaggggccacctctgccttctgcacccctccctatcctcagaactcaatttccctccatcatgcggaggtgaccctctcaggtcacccacctagggcactgttcccagtccctcaaatccaacttccacctctccccctggggagcacacagagcccgcctcggtttggcataccctctttgatgaaacaatcctgtttcacacctctctgcctttgctcctgcagtgccccccaccatttacctttgtcctgtctccatgaccctggactcagcccccaactgaccctgaactgggggcgtggctcctccacggcttccccaggtgagtccagcgtcccccacttatatgccagctcagcccctctccgcttccattcctctaggaacagcgtcgaccagatcacgttgaagagggcaaagaccacgcaggaaacatcccggcttgtctgtgagtggcagagaagagttgagtcattgtttgtgccagtccagaaaggagggcgcctctggatcccccagaccttgcagggtccctgcccagtacctgatcagcctctgtgaatgtgtacaggacagacccgaagacagctgggtataccatagccgacgtgtagaagcccagccaggcgaagtacatggcaattttcacaccaaagtaatcacagatgtcatctgccaggggacaagtgggtctcagtcaccccctgcctgtctgctgggactccctcccaccccccagcccaggcagcacctagaggctggttttcacacacggcctgcacccatgacttcatgaggcggttcagaatacgctgctcgtggacagggaacacctgctggatgatcccacgtgctgccagctccgggactgtggagggaggagcacaggtgatccccgcccctccacctgtgcctagcctggctagcccctctttgtctgaaacccaagtcacagctttttgcctgctcttaaacctctagagctctttccaggggagaagttctagacggatagaagatctgattctccttcagaaattgtaggtgcaggggcaggcggggagaatgtaaaggaactgggagagtggggttctggtgaggaaccatgtttttttttttttttgagacagtctcactctgtcgcccaggctggagtgcagtggcgtgatctccgctcaccgcaaccttcaagcgattatcgtgcctcagcctccggagtagctgggattataggcgcccaccaccacgcccagctaatttttgtattttagtagagacggggtttcgccatgttggccaggctggtctcaaactcctgacctcaagtgatccacctgcctcggcctctcaaagtgctgagattacaggtgtgagccaccgcgcccggctttttttttttttttttttttttagacggggtctagctgtgtcaccaggctggagtgcagtagtgcgatctcagctcactgcaacctctgcctcccgggttcaagcgattctcctgcctcagcctcccgagtagctgggactacaggcgcgcgccaaccacacttggctaatttttgtatttttagtagagatgggggtttcaccatgttggccaggatggtctcgatctcctgacctcgtgatacgcccgcctcagcctcccaaagtgctgagattacaggcgtcagccaccgcgcccggccttattttttactttatttatttatttgtttgagacagggtctcgctctgtcacccaggctggacagaatgcagtggcgctaccatggctcactgcaacctcgaactcctgggctcaagtgatgctaccgcctggacctcccaaagtactgggagccactgcgcctgttcccctgctttaaataaagctcagtttgtggacccgaacgtctgaggaatggtaaaaacttgctgtcggaaggtgaacttgggtgcctagtttcctggaggggaatccaacgcccagagccgcaccactctgtaagtggagtgctgtccatggttcctgcctccactttatcccaaacccagaaaagggcctctcctggacccacctcccagaaataagccccaccctttggccaaagcctcgccccctcagctcattggttcccaaccctttgccaacccctaactggttggacataagccctgacctcctgtcctgataagctgtcctctcagagctccacccaactcaggagataagctccacccttttgctaaggccacacccctttagctcattggtttcctaactctttgccaacccctgactggttggatctgggccccgccctcctgctcctataagctgtctttgaagagctccacccaactctctgcctgtgattggtgttgaccccgccctgctcactgattggctggtcctccaggaagcgcacgttgtggagtgcttctccctgcttggcacgcaaattctgcagccagaagcggatgatgctctggcgttcctgcgaggaagagggcgtgagctcagggaactcataggcacaggatgcatgcgggggcccagagccggcctcacctgggaggtgaagaagcgtagctcgctctccacattctcatagataaagtcctcctcgcaggagaagccgcgggtgcccccgccaaactcggccttcactgctttgcgcagacccagctcgtcggcccctcggagtaggctgtgaagaaggcggaggaggtgggctcacagggaggccccggcccaccatcctggagctgaggatggtgcacctggcagcctttgggacaaacgcagggcggctggatagcatggttggcacttggtagagcggggagtcgggtggcaggctcagcgagaggccagggacaggggactcgcctctcatacgtggcggtgacaaagaaggcgtaggcacgcgtgtggcggtggtggcggacttgcacgatgagctcgggaatgcccacgcggatgtggttcagcagccatagcagcgtgtggtcatcggtcgtgtctgccaaggggcacagggaccgatggctcctgccacgagggggcccaaggcctcctacgtattcccgttctgggaagccgagctcaggagagccgcatctgggcactgggcgggcgggcgggcgggcttgggtacctgggaaggtcatcagcacgtcgcagttctctgtaggcaccgtcttcatccacgccttgtgggacaccaggtagcgaccagcctgcaggagccgctttccgaaaagcttatctagggggcggcgtagcaggcccgggtcaggccactctgggatccggacccggcctccagtcttggctcctcctgcccccgccagggctcctcaccactccacctggcattcaaggccccgggagctctgggcttggcttattttcctccctccacgtccttgtaccagccaggccttcctccagaaatgcccttccccccagatcctcccttacaaatcttactcattcttgaggcccagctccgcctccaaaaccacaatcgatggggcgctcactagcagccctgagcgcttcaccacattatgacagcgccgtccttgcagcagccccagggactaggtgcggttcttacccccatttcacaggtgaggaaactgaggcccagagcgtttaagtcacgcgcccaaggtcacacagtcaagctgggatttgaacccaggaccgtatgattctgtattcttcgcggagaggctctctcaagcacatccctggcccgccgcgatcccgcagcccgggggtggcagggcgcagcccaagcctggggctctcggaggggcgtgtccgcgtctccgcgccgggaccccagcccgaagcaccgtcccagccccgcccgccgggccgcagccgcagtgccgggaggagccggcccctcgtccagacaccacgccaggttacgtttgaccctgatcctcctccccgtgtagttgacgcgggctccccaggcacctgcaaccctgtctggtccagccgccgcacacatacccagaactccggacgccggggctgcaggctcgccctccggcgggggcctcttgccacgctcgccctccagggacgtgcccccggcgccggaggcggcctcggccatggcgaggacaggtcaggtcaggggctacggacggcccgggcgacggggagccgcgggctcatggggccggtgcagccgcggagcgcgcgggaggaggagacaaaggccgcgcccgcccgcgccggcctcggtcctcgctcgcccgagcgctgcttctcgtccccgcccgagccgaacctcgattctccttcccggcccgatgcacgtcactctagggttctcagctgagttcgcccgcctagttctttggttcgcgtctccgcccgtgttgttttctgggtttccttctcgcccgcctacctcgctccctgctgctggtccccgcccgcactgatggtgcattctccaacttgtccccacccatgctttcttctggtccccgcctcggagcctcagtttccccatctgcaaactccggaccctggagacgctgtttggaatgtgagatgggcgtaagttgactaagggaggacgtgggaggggcgggccggttggggaagattcctggtgacaataacttcaaccaccccagtagggctgtgatacataattacagcaagccctgcttaggaactttgcacgcaccatttggctgcctagaacactcctcatgcactcttcgtccggttaacaccgactcccttcaggatgtaacctcggagaggatcccatagagttgtcaagtttagcaaataaaaatacagtccgtctagttaaatgtaaatttcagataaaagaataaatgttagctgggcggggcgcacctgtaatcccagctacttgggaggctgaggcaggagaatcgcttgtgctcaggaggtcaaggctgcagtgagctgagatcacacccactgcactgcatcctgggcgacagaacgagaccctgtctcaaatacatatatatacatacatacataaatgtttctatgtcctatgtctacatgggacatactagtactaaaaaattattcattgtttatttgaaattcacatttagctgggcgacctgggttttacctggcatttggccaacccctgactattctgagtagctcagtctgttagactgaaagcccagcgagggtaggaacgaggggccaggtctggttctcaatgcgagcacacagtaggcgcttgctgtacgcttgttacagatgtaacaactagcttgttacagatgtaataactagcttgttacagatgtaacaactagagaatggcagatgaaatataaatatgtcatcatttgttcctattttacaacttaaaatattaaagcctcggccgggcgcagtggctcacgcctgtaatcccagcattttgggaggccaaggcgggtagatcacctgaggcaaggagttcgagaccagcctgaccaacatggccaaaccctgtctctattaaaaatacaaaaaattagccaggcatggtggcgcacgcctgtagtcccagctacttgggagtctgaggcaggagaatcgcttgaacctgggaggcggaggttgcagtgagtctagatcgcgccactgaactccagcctgggcgacagagcgagaccccgtctcaaaaaaaaaaaaaaaaaaaaaaaaaagcttgggcaacgtagtgagatccccgtctccaccaaaaaaacgaaaacaaaacaaacaaacaaaaacaacaaacaaaaagaaacaccgaaaagttagactggcatggtggctcgcgcctgtggttccagctactcaggaggctgaggcgggcggatcccttgagcccaaaagttggaggttgcaagagccgtgatcgcgccactgcactccagcctgggcgacagagtgagaccctgtctcaaaaataaaataaaataaaataataaagtaaataaaaatattgagcagggcgaggtaagggggtattagaactctattctgtcagacagatttttcttaacacgcaagtgcgccgcccgcccgctctgatccagaaccagagaatccgccatgcgaaggcgctcccggagaccccgcccagccagtgcctggaattccaccatcagcgctttattccgagtttcagtgctgtcctgggttaacctgaaagcaatctccgaggctcccctttctggctttcggggagccagagactgaccggacacttggctctgcaggtgcagacctggaccagagagacagagagccaaggaagtccacagtggagagagggctgtgctgggggttccaggaagacttcctggaggaggggatcttggagctaggccttgaagacgagtttgtcaaatgaggaagggcatccgaagccgagggaacggcagaagggaacgctggggaggggagagaatctggagagttccggaaaaagcaagtaggactctttccagaagttcgggcaagattttccctggatcagggcgtgggttctccagtactcgtccctcccggtcaccgagatgctctgagtttccggtctgaacctgaacgtaaagaggtgtagtccctcctttcttgaacgggaaaactgaacgcacataggtccttgccacgcctaaggctgcggagtgagcagatggaaaatgcgggactcaaaacctcccctcgctgtaatttgcactgccctgtgccaaactctgtcctttcttccattccttattcctattgtcagcctcgctgcgctaggaccctaaaaatttggtctcatgttgcccggggaacaacatttcgctacacctacctccataccgcctcccgctcccgctctcccttgcaccagccaatggaagcgagtatcttcagacggtgggcaggacgtatcctaagatacccaatggtggtcgagaatagttgagcactttactagtcaagccgcggagtgggcggggccccctgcccagacttgaagccacacaggcaggtcgggcaggcgggtcgcaggttgtaaatccatgtggcgggggctttggaccctggcggcccaagcggcacgtgggcctcgcaggtggggctacaggggaaggggtgcgacagcttggggtgctgcttggaccccagacccactccctgggttttaggggcccaattccctgcggcagagcaatcattcgcgttcttccgtgcctcaatcgttcatgacccttgcggcagagcccatatctgggtctccttctggcctcacagtccctaatccggtcacccttcggccttcagaacatccaatttgtgcatcccccagccgcagaacccccccacctggagcatctcgcgatcatcgagccctcggtctacttgacactgaggctgagcctcccaggtgcgctgattcgcctcccctccggttccagattgtgcacgcgccggagcagcggcgcaccagcccccggctccggcgccaccatcttcgcgctaagctctggccaaggccgctgcggcatcgcagtgatccggaccagcggccccgccagcggccacgccctccgaattctcacagcaccccgagacctgccccttgctcgccacgccagcctgcgcctgctcagcgatccccgctccggggagcctctggaccgcgcactggtgctctggttcccaggtgagggtccccaggttccgagcctcctgtaggtcccatgactcagtttcccccttccaagggtttgcactggctgtgctgtcctcctgtcacctgtctgtcacattaggtccccagagtttcaccggtgaggactgcgtggagttccacgtgcatggaggcccggcagtggtgagcggcgtcctgcaggccttgggtgagttgcagcgttgggtgagatgcttggtcctcccaatgggcctgggtggggaccagggggtgtcagactgggaccttcctgcaggcagcgtgccagggcttcgaccggcggaggcaggcgagttcaccagacgggcgttcgccaatgggaagctgaacctgaccgaagtggaggggctggcggaccttatccacgcggaaacagaggcgcagcggcggcaggccctcaggcagctggacggagagctgggccacctctgccgtggctgggccgagaccctcaccaaagcaagtcccccatttgtccattctctccctcagagaccccatctgtgcaacccctgcatgagaccccctctcaatcccgcattcattccctgcgtgaaagcttccggcctatgagccgccattctggcccctgaagtcgggctggacaaattgggtgtgggaaggtgggtttctgggtgcacacaccacctctgctctccctgccccgccaggctctggcccacgtggaggcctatatcgatttcggcgaggatgacaacctggaggagggggtcctggagcaaggtgggtctacctggtggtgggggaggaagacacctcatatcagccctcaaaggctcccctcactgtctctctctgcctgccttctctcacccacagccgacatcgaagtacgggcactgcaggtggccctgggtgcacatctacgagatgccaggcgcgggcagaggctccgctcaggggtgcacgtagtggtcactggaccccccaatgcgggcaagagcagcctagtgaacctgctcagtgagtaggcggcgggaagggggcggggcctagtgccaggggcggggccaagagctgggttattgagttagttgttcaggtctaaagctccctccagacatggggtagaacctgggggaggagctcccttgtctccaccctctcctcttcttctgaccctcccccaggtcggaagcctgtgtccatcgtgtccccggagccagggaccacccgtgacgtgctggagaccccagtcgacctggccggatttcctgtgctgctgagcgacacggctgggttgcgggagggcgtggggcccgtggagcaggagggcgtgcggcgcgcccgggagaggtgggcggacagggtggtgatgggaggggaacgcggggccctttctctgccttttctccctgttgcgtttatttttcattcttcctgaatcagagaacctgctaagccctatcaagcatggatctcagggatttggttctttttttttttttttttttttactccgagaccgagtcttgctctgtcgcccaggctggagtgcagtggcggtatctcagctcactgcaagctctgtcttccgggttcaagcaagtctcctgcctcagcctcccaagtagctgggattacaggcgggagcgaccacgccgaactattttttttttttttttgtatttttagtagagatgaggtttcactatgttggccaggttggtctctaactcctgagcctcggcctcccaaagtgttgtgagcccaccgcacctggcctggtgttttgtttttgtttttgagacggagtttcgctcttgttgcccaggctggagtgtgcagtggtacaatctcggctcactgcaacctccgcctctcgggttcaagtgattcttctgcctgggcctcccgagtagctgggattagaggcgcccaccacaatgccaggctaattttttgtatttttagtagagatgggggtttcaccatgttggccaggctggtctcgaactcctgatctcaggtgacccgcctgcctcggcctcccaaagtgctgggattacaggcgttagccactgtgcccggccagtgatttagttctgattaagtcctgcccccggccctccggacatgtttctcatccctaagccctccgcccagccctcacgttctgccccgccctctcgtgctctgtcccgccctggcactccgctctgccccttgcggtctatcccatcccctgtgctctgtccaccccctacattctgccccacccctggtgctctctaccccttaccctgtggtgtgtctggtccttcttgctctgccccgccactcatggtcgccccactccagtgctgtacccggccccttttgctctgtcccagcccctgtgctgtgccctgtccctcttgctctgctcttccccctgcacagtgctctgcccctcttgctctgccccgccctcctgtgctgtgccccgcccctcctgccctgccctactcactgcactgtgcccagcccctcctgctctgccccgctcccgcaccgtgaccgctcctcttgctctgcccttccccctgcactgtgccccgcccctcttgctctgccccaccccctgtgctcggcttgggcccccaacattctgccggtcccctggtactctactcctccctcccgacctcacgcttcgcagctcccccagtgctctgcctggcccctctaactgtccctccacccagtgccttcaattgctcaacctgggatccccgctcagttgaccttgctcccgcaggctagagcaggctgacctcattctggccatgctggatgcttctgacctggcctctccctccagttgcaacttcctggccaccgtcgtagcctctgtgggagcccagagccccagtgacagcagccagcgcctcctcctggtgctgaacaagtcggacctgctgtccccggagggcccaggtcccggtcctgacctgcccccgcacctgctgctgtcctgtctgacgggagaggggctggacggcctcctggaggcgctgaggaaggagctagctgcagtgtgagccccctcccactcccagcctcccctgacccacagtttaagtgtgggtccctcaacttcaatttctgaacctacaaaatgggtacaaccatttccccttcaagggatggttgtaaaaggtcgggagagaccatgtctcttgtctcttccaggtgtggggacccgtccacagatcccccgctgctgacccgagcaaggcaccagcaccacctccagggttgcctggatgccctcggccactacaagcagtcaaaagacctggccctggcggcagaggcgctgcgggtggcccggggtcacctgacccggctcacaggtggagggggtaccgaggagatcctggacatcatcttccaggacttctgtgtgggcaagtgacgggatccagggaagtcgcacccaagctgcgtggagacccaggagcctcgggggatctggaaacagtttaggccaattgggattctcattcgcctgggaaagaacttgattctcaaatagtgaagcaacacagctgagaggtagtgagatccctgcagggactccctggagattcaggccctggaatggggctgaatggaggtcccgttcgacccttgatgctggggcatccgggttgggatggagataggaggatctcagtatatttgtttcgtagttttttatttattttgcaaataccaaaggaatgtaaaaaaaactcaggtgatctagaagtgtttattttcttcccttcccttcccttccctttccttttccctttccctttccccttccccttccccttccccttcccctacccttccctcctctgtctattgcccaggctggagtgcagtggtgcgaccttggctcactgcaacctccatctccggggctcaagcgcttctcctgcctcagcctcctgagtagctgggattacaggcatgtgccagcatgcccggctaatttttttctttttttgagacagagtctcgctctgtcacccaggctggagttcagtggtgcgacctcggcttactgcaacctccacctcccgggttcaagtgattctcctgcctcagcctcttgagtagctgggactacaggcgcacaccaccacgccaggctaatttttgtatttttagtagagacaaggtttcaccatgttgaccaggctggtcttgaactccttgacctcaggtaatctgcctaccttggcctcccaaagtgctgggatcacaggcgtgagctatcacacctggccccagaagtgtttcaacatggaaattttccttagcccttctgtggttgtcatggcttaatgtgtgtctttccagaactttgaatgtttgcatacttgtggatgtacctttcaaatatgtttgtcttgtgtatcatatataaatggtattgtgttcattgctctacaaattgtcatttctttttaaaaaaaaaacagaattatggagatggggggtctcactatgttgcccaggctggtcttgagctcttggactcaagccatcctgctgtcttggcctcccaaagtgctgggattacaggtgtgagccacggtgcctggcctcattccttttttagtctttagtcttctttttttttttttttttttttgatggggtttcactgtgttagccaggctggtcttgatctcctgaccttgtgatctgcccacctgtggcctcccaaagtgtgtgtgtgtgtgtgtgtgtgtgtgtgtgtgtgtgtgtgtgtgtgacagagtcttgctctgttgcccagactgaagtgcagtggtgtgatctcagctcactgcagcctctgcctcctgagctcaagccattctcgtgcctcagcctcccgagcagctgggatcataggtgtaccctaccacacctggctaacttttgtatttttagtagagatgggtatttgtcatgttgcccaggctggtctcaagctcctggcctcaaaagatctgcccgtcttgtcctcccaaagtgctggggttacaggcgtgagccaccacacccacctttttttttttttttttttttttagatggagtctcactctgttgcccggcctggagtgcagtggcgcaatctcggctcactgcaagctccgcctcccgggttcatgctattctcctgcctcagcctctgaatagctgggactacaggcgcccgccaccatgcctggctaattttttgtatttttagtagagacagggtttcaccgtgttagccaggatagtcttgagaccctgaccttgcactaccatatcccatgtctggctaatttcttattttttatagagatggggtctccctatattgcccaggctggccttgaactcgtggactcaagcgatcctcccaccccagcctcccaaactgctgagattacaggtgtgagccaccacaccaggacaacctcttgtatcttaaaaatgactggcaaggccgggcgcagtggctcatgctgataatcccagcactttgggaggccataggtgggcggatcacgaggtcaggagatcgagaccagcctggctaacacggtgaaaccccatctctactaaaaatacaaaaaattagctgggcatggtggcatgcgcctatagtcccagctatcgggaggctgagtcaggagaattgcttgaacccgggaagcagaggttgcagtgagccgagaccgtgccactgcactccagcctgggcgacagagggagagtccgactccgtctcaaaacaaataaacaaacaaacaaaaatctgactggcaaaacctaggggtctttctccctctataagctgaatctttattcattcattcattcactcactccgtgaatattcatcaaactcctgcatccagcattgtacacatcattttattgaatcttcaccacagcacgatgttgtggctattttcttccagttttgcagatgagaaaactgaggctcacaggaatagttacttcctggagtttccccagctttggggtttgaacacaggtctgtttgactccaaatctgagtttgctgagggcctcctgtgcagcaggcaggatgttggggtcacagaggggagcaacaggcttggtccctgttcacattaaagaagtgacaagaggccaggcgtggtggctcacgcctgtaatcccaacaattttggaagccaaggtgggcagatcacttgaggcctggagtttgagaccagcctggccaacgtggtgaaaccccatctctacaaaaaatacaaacattagccaagcatggtggcacacgtctgtggtcccagtaactcaggagggtgagacaagagagttgcttgaacctgggaggcagaggttgcagtgagcagagatcacgccactgcactccagcctgggcgatagagcgagactctgtctcgaaacaacaacgaaaagaagagacaagaaagaggtcattacagtgaggcctgatggctgctctttttttttttgagatagagtctttgctcttttgcccagggtggagtggcatgatctcagctcactggcaacctctgcctcccaggttcaagcgactctcctgcctcagcctcccgagtagctgggactataggcgtgtgccaccacgcctggctaatttttgtatttttagtagagacgggtttcaccatgttggccaggctggtctcaaatgcctgggattacaggcgtgagccaccgtgcccagccttttttttttttttctttaagtaaagatgggggtcttgctgtgttgcccaggctggtctcaaactcttggcctctggtgatcctgagacctcagcctcccaaagtgctgggatcacatgtgtgagccaccgtgcctggcctgatggcttctttgaagctcataaagaggagaagtgacctagtcaggcaacttaaagtgggctgcctggcagaggtgatgagtgttgagatctgaatggtgaggatgtcagatggaggagtctggggagggcaccccaggcagagggcactgaatatgcaaatcccttcatatgcatatcccactgacacatatttcactggattacatatcccactgattcaggaacttcgcggtgtgttcaaggaatagtgagatggtcaggtttttttgttggtttgtttgctttttttttttttttttttttgagacagggtcttgctctgtcgcccaggctggagtgcggtggcgtgattgtggctcactgcaacctccgccttccaggttcaagcaattctcctgcctcagcctcccaagtagctgggattacaggcatgtgccaccacgcccgaccttttttttttttttttttttttttgacaaggcctctccctttcacccaggctggactgcagtggctcgatcatggctcactgtagcttccatcttctgggctcaagtgatcctcccacctcagcctcctgaatagctaggactacaggcatgcgccaccacgcccagctaatttttaaatttcttttagagatgggttctcactatgttgcccaagctggttttaagcttttgggctcaggcaatcttcctgccttggcttcccaaggtgctgggattacaggtgtgagctactatgcctggccctttttttgggggggggttggggtggggtctcactctgtcacccaggctggaatgcagtggtacaatcatggctcactgtaatcttcaacctcctgggctcagttgatccttccacctcggcctcctgaatagctaggaccacaaccaccatgcccggctaatttttaaatttttttcatggagacaggatcttgctatgttgcccaggttggtctcaaactcctgacctcaagtgatctgtccgcctcagcctcccaaagtgttgggattacaggcgagagccaccgcgcccggccagaggtggtcagagtggctggagcagaggaaaggaggagaaagaggagggagaccattggagaagggatggatggaggggtctgataggcagaggttcgtctgagattcttcggggagcctgacgtggcggggaccgaccagcagagggcgcgtcgcgctaagtgaggcggtccccagcaatcctcccatcagcgctcccggtgccccaccctcagcggatctaggccttccgcattcacctggtggcatgtgaatggttaacttcccctgactggggtggaaactgagtctcgaagagaatcaggatcttttctggaatcagaaaaagatctccacctccagtggttgaatatacaaactctgatttcagtggacacagagcctgggaggcatccgcggcagagagagggcacgaaaagggcctaaggaggcccgcagagtttctgaccacccaactgaaggagacctcagggccgggcgcggtggctcacgcctgtaatcccagcactttgggaggccaaggtgggtggatcacctgaggtcaggagaccagcctggccaacgtagtgaaaccccgtctctactaaaaatacaaaaattagccgggcgtgctggtgcatatctgtaatcctagctattcgggaggctgaggcaggagaatcatttgaacctgggaggcggaggttgcagtgagccaagatggcgccactacactctagcctgggaaacagagtgagactccatctcacattaaaaaaaaaaaaaaaagaaaaagatctccacctccagtggttgaagatagaaactctctggtttcaggggacacagagcctgggagacatcccgggcagacagagggcatgacaagggccaaaggaggccaccagagtttcccaaccacccaactagaggagacccaggcctgattttatttacagggttcctggcagtatgtcactatttgttcatttccttgcttgttcaaccaaatcaacaaattggggctggaggggcggtggccagagtggaaagggtcacaccatgagctgagtccacagatgttactattggccccatcaggaaaccaaaccgatgcccagagaagaaaagcaataatgtagatctgggcgtgaggggtgggcttgaagtggggagggtcctgaaggctcccaggaggggtgagctgggcctgtgcctgggtgggattggagatgctctttggacaggatgctggggccccgcctgccttccctggggccctggcacacagctggcctgaggtccttggctacaatcctttttttccaagaagggtgaggtggtttgtgggaagcagccatgggggttatttatagaggctgcaggaaatccccaaagagtctgagactcgccaggcggttggacctcagggtcaggaagggggcctgatcggccaattgctcgacccccaccccctgtattcagcccccacccggttcctgaggagtcaccagcctgggacagtcagagctttagggtcagagctggaaagagggagggatgaggctgggagagaggtttccaaaaggggaagcaagggctatatctgggacttcaagaaaggctgcctggaggagggggtctctggagctgggcttcagaggtagaagggttcgttagacatgaaaaagactttctaatccaagggcacagcacaaattaatgaatgttgagtcttttacaaagaattaaaaagtccaggataggaggaggcaaaaggggagtcacagatgtgctaaggagttagactttgttctaagggtaatagggagccatggagagtgtgtgagcaggagagggacttggacagagtctgtaatggaaagactcctctggaccagcacaggagccataccagaggcagcagctgaggtgcaagtgtacaggggctgagccagggccaggtcactgggatcggttagagggatgatggctcctggaatgctctggaaggcaaaacagacaaaggaccagaggcctgtgcccatgtgtctggagagtttagaattattactattattattttagagacagggtcttgctctgtcgccccggctggagtacagtggtgcaatcctagctcactgcagcctccaactcctggactcaagtgattctcctgcctcagccccccaggtagctgggactaaaggtacgcaccaccatgcccagctaatttttaaatttttgctagacatagggtcttgctaaatttctcaggctggtctcaaactcctggactcaagcgatcctcctatctcgatcccccaaagcgctgagataatagccatgagccaccgtgcccagccctaatacaactttatttataaaaacaatgcctgaccttagagttattattattacacccaatgcttggatgagaaaatggaggctaggattgactgagccaagattcaaacccagggatgtttggctctgaaatcctaaatcaggtcttctgggatggttaggactggctggcatcaatgtctccccctaaggactctgggctgtctggcagtaggcttaggggcagggatgtccccgcttccttggggcctccagctcagcccgtctgggcggtctggccaggctgacccccctactctgtcttggcagagccccagctgagcgcttcctgcggtgaccatctctcgcccttgtttccgtatcccggaaatatcgttcctttgtccctccagactagcctgccctaagcgtggcgctgccagctcccaggtccttgtgactcatccgtcccagtccaggaccccaggggatgggctgggagggaattgagggattgagaggatgggaggtgttgggggaggagacaagctgagatcctagccagtgatttctttctttctttctttctttctttctttctttctttctctctctctctctctctctctctctctctctctctctctctctctctctctctctctctctctctctttctttctttctttcttttttttgagatgcagtctcgctctgtcgcccaggctggagtgcagtggcgcgatctcggctcactgcaacctctgcctcttgggttcaagcgattctcctgcttcagcctcctaagtagctgggactacaggcatgcaccatcacgcctggccaatttttttgtatttttagcagagatgggatttcaccacgttggtcagactggtctcgaactcctgatctcaaatgatctgcccgcctcagcctcccgaagtgctgggattacaggcatgagcaaccatgcccggccctagacagcgattttaaggctgtttttcctgatggccattggctttatgtcctgaagtttttacttgttagagataaagccccagggatggggttacagagtcaaagttttgtgcattcattcatttgagacagggtcttgctctgtcacccaagttgatgcatagtggtggaatcagagcccactgcagccttcagctcctgagctcaagcaattctcccacctcagcctcccaagtagctggcactacaagaacgcaccatcacacctggttttctttaaattttttgtagagacgaggtctcgctatgttgcccaggctgacctcgaattctggcgctcaagcgatcctcctacctagggctctcaaagtgctgagattacaggaatgtgccattgcacccagcctgattttattacgtttcactaaactagtttctggaagggctattacaggacttgaatttctaccagtcttgtaggaaaaggaccttttttctacacctttacttgcagtaggtgttgggtgttatgaccttgaaaagacattttcccagtctgctgggtgcaatgtgatttccctgtgttctttcgatttgcttttccctgactactggctaatttagtgatagcagtgagccaaagtgtctttaaactggacactggtaccttttctggagaattctttgcaaacctagaactttctttctcttttttctttctttttttttttttttttttgagacagggtcttgctttgttgcccaggctggagtgcggtggcgtgatctcggctcactgcaacctccgcctcctagggttcaagaggtcctcgtgcctcagcctcccgagtagctgggattacagacgcacaccactacgcctggctttgtgtttttttgtagagatggggttttgccatgttggccaagttggtcttaaactcctggcctcaggtgatccactcacctcagcctcccaaagtgctgggattatagggactacaggcgtgtgccaccatgcctggctaatttttaaaatcttttgtaaagacaagttctcactatattgccacaactggtcttgaaatcctgggctcaagcaattctctcacctctgcctccagattagctgggtccacaggtgcacatcaccatgcttggataatttttaaggtttttgtagagacagtgtcttgctatgttgcccaggctgttcttgaactcctgagctcaagcgatcctccagcctcagcctcccaaaatgctgggattacagatgtgagacatctttcttggcctgctgtttaaaggaaacactaaatttaacagcattgccgtcatgatgctgtgccttgtagccactgcattaaaccctctttggctatgactctgctatttccctttgtgtatagagatgcctgtgccttgggggctgctggtgtcccccaacgtttgttccaggttgaagggtcttgtggcctggaggagttggggaggaggttccctggctttcatcttctttccagtcttttctccttcatagccatgtggtacttttgttgttgttgttgttgttgtgttgtgttttgttttgttttttgctctgttgcccaggctagggtgcagtggctcgatcttggctcactgcagcctccacctcccgggttcaagagattctcctccttcagcctcccgagtagctgggattacaggcgtgcatcaccacgcccagctaatttttgtattttaagtagagatgtggtttcaccatgttggctaggctggtctcgaactcctgacctcaagtgatcctcccgccttggcctcccaaagtgttgggattacaggcgtgagccagcatgcccagaaaccatgtggtacctttaaaagcagaaatcacgcttctggagtctttgaaggatttactaatatttattaagtgccaccaacatttcaacgggccacaggcagggctgggagttgggggagaaggagtggctcccctcccgacaacaggtgaccctcacccccggctcagggccccgagggggtcctggaaacactcacgctcaaggagcggaggtgaatggcttcctgttctcacctccgggtccaggcactgggggtgaggaagtggctgggaggccaggaggctggaggaggggaggtgctggggcccagggctgtgcgggaggggatgggatcctgtgggtaccttggcccgtgtgccagggtcgggggaacgtgacactaggtgagaattgggtagaaagtgtgtgtgaaagggcatgcgtgcatgtgatgttggtgccatatctataggtgtcgttgtcatggtgtgtgttgtcactgtgtctgtgtgtgacatcatcaccgtctgtgtgatgccatcgccgcgtctgtgtgacattaatatgtgtgacgtcgacatggcccgtgacgtcgttgctgcatctcggtgtgacgtcatgccaagttccccatgtctgtgtgcgacgtgctgcatctgcacgacgccatcgctatatctcttcgtgacgtctacatggccacgtgacgccatcaccacggtgatatgtgacgtcagcgccgttgcttgcgtgacgtcatctccgcggccgtgtgctctgggtgagggatcgtgaggcgcgggtgcgggtgtgagagggtactaggggtttgcatgcagggagttgtctgatggtggccctgggtggttgggggcggcgggagggggttgtgtcgggcgctgtgagcatatccctgcatcctccgcaaaccgccgagtcgggccatcccttggtcctcaggcctggagcctcctcagccactagggcaggaaggggatggtaacacaacagagtgtcagacagagggaagggcaaacctcgccgggccctggaggctcgtcctcagcggggacacaacatcctggggaccccggccctgcctcctaccaccctgggcccctacttcttcctcagaaccccagggctccttcgggttcagcctctccatgagacgctcatgtgttgaacctccccaggatggtgaatggtgagactgaggtgtgttcttccccattatacagatgaagagactgagattcagagtggccacacttcacgagccccaagcctctgctacagcttgtttgactctccccagtgcctcccaacattctggggatactgagaatttaccccaaagcctctgctcccccagacccctacactggttcccaaggcaaggcttcggtctccctcttttgcctgctcctgctcacatgtcctccatggctccccagtgccctcaggagaaagtccaaaccttacaacgtggcattcagggctccacccctctgcccctgccaggcctccccatcagggactcctgctgtgccaaagacccaacaattccaagagccatcacactgcttccgcaccctccggccccaccgcctttgcacgatcggagttgtcttgctatctgggatgccctccccctcctgggcctggcagaggttcctgcgaggggtcaggggttggcttagagcctgtttcctgctgggggaggagggggctgtggctaagtcccgcttccgctggtcctctcccttccttccccggctcttccctggggcccgagtggcctcacgttccttggttggctctgggccctggccctggccccagactccatcctcaaccagcatttacccagctcttgtccctgctgccagcctgcaaggctccatctttgcttgaactgggtcaatgcacatccctctgtcctggtccccagctctttgtcccgtagtctgttccccaacagtgaccagaggaacttgtggatgcttgaactgggtcatgcacatcccccgtctgctcaggtcctcacagcagccacaggcagggcttgatcagctcccatcacttccctgccctcacctcctcctcccgttcccctccatcactccactccagccacaccggcctcttccctcaaacacacaaggcacggtcccaccttggggcctttgccctggctgtgtcctctgtctggtgcacccttcctgggatccccccatggctcctccctcacctcctctgggtctctgcttcaatatcacctcctcggtgtagcctgccctgtctctggtagaaagttccaaccttcttacgcttcctgcccctttctctgtctcgcccatcaccaaaggacccttgagtgacccgttcatctaatttattatccatctctcccactagactgtgagccccatgagggcagcgggtttctgtgccttgttcccagcacccagcaccatgcccggttaccagcagctgctcaataaatacggctcgaatggacacacgaatcatcagaggcgttaacagtgaacttgaacaacattaaccacgtgtccagctcagagccagggctggactcccatcttaagcccatacggccgggcgcggtggctcatgcctgtaatcccagcactttgggaggccgaggtggagggatcatttgaggctaggagttcaaaaccagcctggccaatgtggtgaaaactcatttctactataaatacaaaagttagccgggcctggtgatgcatgtctgtaatcccagctacttgggaggctgaggcatgagaattgcttgaacccaggaggtgggagttgcagtgagccaagatcacaccactgcactgcagcctgggcaacacagcaagactctctcaaaaaataaaaaagattaagaaaataatgccaggcgcagtggctcatacctgtaatcctagcactttgggagacggaggtgggcggatcacctgaggtcaggagtttaagaccagcctggccaacatggcgaaacgccgtctctactaaaaatacaaaaattagccgggtgtggtggtgcatgcctttaatcccagctactcgggaggctgaagtaggagaatcacttgaacctgggaggcagaggttacagtgagccgagatggcaccattgcactccagcctggaaaacagagcgagactctgtctcaaaaaaaaaaaaaaaaaaagggccgggcgctgtgactcacacctgtaatcccagcactttgggaggccgaggcaggcggatcacgagatgaggagatcgagaccatcctggctaacacagtgaaaccccgcctctactaaaaatacaaaaaattaaccgggcgtggtggtggccacctgtagtcccagctactcaggaggctgaggcaggagaatggcgtgaacccgggaggcagagcttgcagtgagccgagatcgtgccactgcactccagcctgggtgacagagcaagactccgtctcaaaaaaaaaaaaaaattaaaattaaaaataaaaataaaatcttggccaggtgtggtggcccagcctgtaatcctcgcactttaggaggctgaggcgggcagatcacctgagatcaggagttcaagaccagcctagtaaacatggtgaaacgccatctctactaaaaatacaaaaaaaatcacccaggctggtggcgggcacctgtaatcccagctactcgggaggctgaggcaggagaattgcttgaacctgggaggtggaggttgcagtgagctgagatcacaccagtgtactccagcgtgggtggcagagtgagactccatctcaaaataataataataataataataataataataataataaaataaataataaaatcttttttaaaaaaagctcttcccattgcaatttttgccatattcagccacatagctcctggaccaagatttacttaatatttgccatttaaaaaacgttttagaggcagggtcttcctctgtcacccaggttggagtgcagtggcgtgatcatagctcactgcagccttgaactcctcggctcaagcagtcctcctgcctcagcctcccaagtagctgggactacaggtgcatgccatcatgcctggttaatttttttttttttttttgagacagtgtctcgctctgtagcccaggctggagtgcagtggtgcaatctcagctcactgcaacctccacctcccaggtcctggttcaagcaattctcctgccttagcctcccgagtagctgggattacaggcacactccaccatgtccagttaattttttgtatttttagtagagacagggtatcaccatgttggccatgctggtcttgaactcttaacctcatgatctgcccgcctcagcctcccaaagttctgggattacaggtgtgagccaacatacccagccattactgtctttatatcgtttttaaagaaacttacattgatttccaaagacactcagtctctacttctttttttgtttgtttttgtttttgctctgcctcatgtgatctgcaggaagggacactcagtctcatcaagtaaaggaaagctggcgcacacatcaccaacagaaaatgactttaaaattttccataggccgggcaccatggctcatgcctgtaatcccagaactttgggaggccaaggcgggcggactgcctgaggtcaggagttcgagaccagcctggctaatgtggtgaaaccctgtctctactaaaaaatacaaaaaataaccgggcatgctggcacgtgcctgtaatcccagctactcgggaggctgaggcatgagaatcgcttgaacccgggagacagaggtttcagtgagcagagattgcgccactgcactccagcccagcgacagagtgagactccatctaaaaagaaaaagaaagattttttttccataagagcaagacctcacgccgaagcccagctgatgtggggccctgcgtcggccatcgatttgggaacacgggagatgcgcaagtgtctggaagccgttagagcaagttaataccagctaaggctttgtctattttatttttttaaactaaacactatattaatgagaattttattttttctctcttagagacgaggacttgctatgttgcccaggctggacttgaactcctagactcaagcaattcatcctcctcagcctcccaaagtgctgggattacaggcgtgagccactttgtcccactaaactgagattttatcaaggcttagaaggaataagagtgggtcgggtgtgatggctcacgcctgtaatcccagcactgtgggaggctgaggtgggtggatcacctgaggtcgggagttcgagaccagcctgaccaacatggtgaaaccccgtctctactaaaaaaacaaaattagccgggcgtgatggcgcatgcctgtaatcccagctgcttgggaggctgaggcaggagaatcacttgaacccaggaggtggaggttgcggtgagctgagatcgggccattgcactccagcctgggcaacgagagagaaactccgtctcaaaaacaaaaaaacaaaagaagaagaagtaagagtggaggccggagggggtggcttatacctctaatcccagcactttgggaggccaaggagggcggatcacttgaggccaggagtttgagaccagcatggccaacatggtgaaaccccaaaatttttacaaattttgtagaaaaagatacaaaaattagccaggtgtggtggtacactcctgtaatcccagctactcaggaggctgaggcaggacaattgcttaacccaggagacggaggttgcagtgagctgtgattgcgccactgcactcctgcctaggagacagagtgagagtccatctcaaaaaaaagaaaaaggagtggaaaaggaaaaatcaactctcccgatgcatgaggtgggtgatttaatgctgagtcttgtcccagcacctcattaggtgcatctaaaattctagtgactcagctacttgggaggccgaggcaggaagatcacttgaggccaggagttcaaatccagcctgggcaacatagcaagacccctgtctctacaaaaaaataacaatttagctaggcatggtggagtgtacctgtaggctcaaccactggggaggctgaggcaggaagattgtttgagcccaggagttcgaggctgcagtgagctatgatcgtgccactgcactccagcctgggtgacagagcaagaccctgtctcgaaaaaaataatgattaaaaaaataaaattccagtgactctccccaagttgcccagttaacccagagcagacagccccagcccacttgcccccggcctctctcaggggaaggcgagtcaagggcagaagccagcaggccagaagcccttcctgcgaccgtgaggagagaagcaggcaaggtccaggcttaagtacacattgttttctcggcaggtggacgtcatttcggggtaaacaatgtcaagagcttccctggttctcagccgaggccctgacagtcctgggctgggagcccgggcctggccctgattctccactgtgtgaccccaggctgctcacttccctggggcctcagtttcctcctctgagaagtggggataataatagaacctccttccttgccatgagggctttcggccaagatggagagaggaaaattgtgtttgcttggagcggggaatctcctcctcacctttttgtttccctccctgtgggctgctcagggctgagaactttctcccagacagagccatctagagcaaaggggttgagagacagcttggcgagggagtgagctccctgttggagagggtatgcaagaaggaaaaaaaaaaaaaagaagaagaggtggaaatggagctggacatgatgcatcctggggagttggcggcaaagctttcggaaatctacttggccagaaatcccatattagccctctgaggctgcaacagacccagaatgacaatagctccgtggcaaaatggtcataggcacagtggttggggtcaaagggatctgacttaaagttctggtgccttcctgagcctcgggtcctaaactgcaaacagcaatgccaggccctgactcctccgtcagtggtgtagcaggaccccagagagagcacaggctattcttggggcggtggcctgagtcaccatccctgtgacgcacaggccaccctctgagaagtgactgactctgggaggaggcagggggcacaggcagcaagccatgacctgagcgtgtgccaggagcccttgctgcttcctacagaggcccctagtcccttgctccggtcatttttggatggcaccttgcaattagcaaagcatttccaggcccttgacttcagagactatcttttttttttttccaagacaggatctcactctgtctcccaggctggagtgcagggatgcgatcttggctctctgcagcctccacctcctggactcgggcgatcttcccacctcaggctcctgagtagctcggactacaggtgcgcaccaccacacctgggtaatttttgtattttttgtacagagggggttttgctatgttgcccagactggtcttgaactcctgggctcaagcaatcctctcacctcggcctcccaaagtgctgggattacaggtgtgagccacagtgcctagctgagactcttttttatttattatttttatttttattttttgttgcccaggctggagtgtagtggctcaatcttggctcactgcaacctccacctcccgggttcaagtgattctcctgcctcagcctccggagtagctgggattacaggtgcccaccaccacacccggctaatttttgtattttttttttttttttagtagagacagggtttcaccatgttggccaagctagttttgaactcctgagctcaagtgatccgcccgcttcagcctcccaaagtgctgggattacaggcgtgagccactgcaaccagcctctctttttttgagacagagtcttgctctgttcccaggctggagtgcaatggtgtcatctcggctcactgcaacctctgcctcccgggttcaagtgattctcctgcctcagtctcccaagcagctgggactacaggcgcataccaccacgcccagctactttttgtatttttagtagagatggggtttcaccatgttggccagatggtcttgatctcttgacctcatgatccgcccacctcggcctgggattacaggcgtaagccaccgtacccggcctctttttttttttttttttctgacacagtctcactctgtcgtccaggctggagtgcagtggcatgatctcggctcactgcaacctccgcctcccaggttcaagcaattctcctgcctcagcctcctgagtagctgggattccaagcatgagccactgtgcccagctgagactcattttctagaaagtaaaggtcaggattcattcctggatgccactcccccttctctccctctgctcattaccttccctcacccccgtccagcctccaggcctttggcctggctgttcctgctgcctagaacactgttccccctgctttccctgaggccagctcctcatgctccagctcttcctcaccaaggctctctcttgcctgtttggggtccgatggcctgggttcatgtcccagctctgctgtgctccctggggtacagggcatgccctctctgtgcctcactctcctcatctggaaagtgggtagaatagtggtttgccctactattattgttaagttgtgaagattacatgaattaatcttgcaaagtacttagaactgcgtggggctcccagtaggtgcctaataattgtaggctctttggtagtcccatcatgacactgtctaacccactactcagggagtttcatgaggacaggactgggtgtgtcttggatactgctgtgtccctcacgcccaaccatacatgacctagtatacagcaggtgctcaattaaggaagaagcaagtgtgagatcagcctccctccaccctcagtcctggtcctagctttgcccacagttctaagactgaacaactgcagtctgcccagtgccttacctggatggggctacagggatgcctgcagggggcctctgggactccaggatcttcctcttgaactcctccaggctagctgggtctgtggagggagagaggtgaggcttgacctacagcttcagttgcccctgcccctgggctagggatgggctggcagcccaggggagtgggaaagtggggctggggtggggttcgaggtggaaaggggcccctcccctacttggctctgtcttttgtcactcaccgatgggctgggggttggggacagggcccatgggccttgacactggcatcatcggctgcgactgtgaaagaaagatggagggaggttggtaggagccagggcttcccagacaggcttctgccttttcttttcttttctttttctttttttttttttttttgagacggagtttcgctcttgttgcccaggctggagtgcagtggtgtgatcttggctcattgcaaactctgcctcccaggttcaagcgattctcctgcctaagcctcctgggtagctgggactacagtcacacaccaccatgcctggctaattttttgtatttttaatagagctggggtttcactatgttggccaggctggtctcgaactcctgacctcaggtgatctgcctgcctcggcctcccaaagtgctgggattacaggcatgaaccactgcacccggccaggttctgtgctttcatgcccttcaagaccatcgtctctaaagtccttccagggcagggtaacagaccccatgtagaaagacatacatggtcatgaacatagaatcacctgcacgcaccacaagacttggggacaccacaagatggcttggggacttgtgggactgatcacctcggcagtcctgaggccccatgctgcagagctggcctacccctgtctccatcacagcctcagggtgaatccagttccaacccaagaccccatcggagtctactcacccaccacagcccccttcagactgaagccaacctaccgtgtagactaactggaccccgatcctaaatgccacccctggaatatccctgagccaatcccccaaaacctgaaatccaaagccaattctgaactcaatcacctaaaatctgatcccaacgtgaaaagtcaatctcccttagaatcaagcctcagcctaaacccagtcctaattataaactggatctgaccatatcttcagatctcactctgactccaaccattctcttgacccaacctctatgaaaatacccgtttcgggccaggcgtggtggctcacgcccgtaatcccaacactttgggaagccgaggtgggcagatcccctgaggtcaggagttcgagaccagcctggccaacatggtgaaaccccatctctactaaaaataaaaaaaaataaaaaaaaaaaaatcagccgggcctggtggcgggcacctgtagtcgcagctactcggggaagctgaggcaggagaattgcttgaacctgggaggcggaggtagcagtgagccaagattgtaccactgcactccagcctgggtgacagagcgaaactctgtctcaaaaagaaaaaagagaaaatatccatttccccagccccagccctgtgctccaacatgtcctcctacaaacacttgtgcaatgtcatgctcaacctcctcaaccccagaccccagcctctgcccagctcccatcctaaacccaccctcagttccaatcccaacccaaacttcactccaatcctaaggccctatggagcccctgatgttaacccgaaacagtcctaagctggtcagttaccccaaatccacctcaacccacttccaccccgagattggcatctaccccaaattttcctctcaacccagccctgatcgtcactcaaccccaatgtccccagccataacccagggtcacccaatccttcaactcaactccaagcccactcaaccttccaccagtcaccctaaaccaaccgaacctcaactcctaacccattgtcaataccaatccctatgtcaatgccagtgaaatccaaaattcacccttggctgcaacctctaagcatctctataccgaccagccacctccagctaccagagcctccaatccagcttcagtgcttcaactcagtcccgaagcaactgagatcctagatcattcttcacccaacctcaccccctacaagcatccctgactcaatttgcaagcttttctcaccatccaaattccaaattcaaccccagttctaaaatcagtgaaatcctaagtgaaatcctaaccttaactcaaatcagctccagatacagcagtgaccaaaaactcatctcagcccaacttaaacacgagttcaaccttcacatcaactcttcctctaggcatcctcaccccagtatcactcccaacactaaaccaactccccggttcctcaacacaactcaaatacaggattttaactccgaccctaaccccaatcctcatcccagccgtaaaagaacccaccagctccctacgctcaaactcagcctcgattctttcatttttcgtttttagaattgggagcagattttattttattttagattcagtggggatgtgtgccagtttgttacactgggtatattgcatgatgcagaggtttgggtttcttttttttgagacggagtcttgctgtgtcacccaggctagagttgcagtggtgcgatctgggctcgctgcaacctctgcctcctgggttccggcgattctcatgcctcagcctcccaagaagcagctgggataacaggtgtctgccaccaagcctggctaatttttgtattattagtagaaacagggtttcaccatgttggccaggctggtctcgaactcctgacctcaggtgatccgcccacattggcctcccaaagtgctgggattacaggtgtgggccaccgcgcctggtcgtagaggtctgggtttctaatggtcccattgcccaagcaatgaacacagtacccaaaatgtaggtttttaaccccttcccccctcccttccaccctttcccattttggaaccccagatgtctgttgctcccatccttggtctttcactcaagctggagtgcagtggtgcaatcccggctcactgcagcctcaacctcctgggctcaagcaatcctcccacttctcagcctcccaagtagctgggattacaggtgtgtgccaccacacccggctaatttttttttttttttttttgagagagaattttgctctgtcacccaggctggagtgcagtggtgtgatcttggttcactgcaagctctgcctcccgggttcacgccattctcccgcctcagcctgctgagtagctgggactacaggcgcccgccaccacacccggctaaatttttttttgtatttttagtagagacgggatttcaccatgttagccaggatggcctccatctcctgacctcatgatccacccacctcggccgcccaaagtgccgggattacaggcatgagtcaccgcgcccggcctaatttttgtattttttttgtagggatggggttttgtgttttgtttgtttgtttgtttgagatggagtctcgctctgtcacccaggctggagtgcaatggcatgatattgactcactgcaaactctgtctcctgggttcaagagattctcctgtctcagcctcccaagtagctgggattacagacgcacgccgccacgcccagctaattttttgtgttttagtagaggcgaggtttcaccgtgttgcccaggctgatctcaaactctgagctcaggcaatccacctgcctccgcctcccaaagtgctaggattacaggcgtgagccaccacacccagcctggggtggggtcttgctatgttgcccaggctggtctgaactcctgagtttaagctatccttccaccttggcctcccaaaatgctgggattacaagtgtgagccaccaagcccagccagcctcaattcttaatcctttctcaatgtcattcctaattccaaactctaccctaatcctaatgccaataaacttctccatccacattactacaatcctataaccatctgtagggcggacagccaccaacaggtcatcacagtatccatcctaaatccaccctccatgcctcaactcaacccaaacccaaaagcaacagaaattctagatccaacccttcacccaaccctagacccgatatccaccctacctctaattccagtcttttttttttttttttttttttttttgagatggagtcttgttttgtcacccaggctggagtgcaatggctcgatcttggctcactgcaacctccacctcccgggttcaagcgattctcctgcttcagcctcctgagtagctgggattacaggtgcccgccaccacgcccggctaatttttgtatttttagcaaagacggggttttgccatgttggccaggctggtttcgaactcctgacctcaggcgatccacccaccttggcctcccaaagtgttgggattattggcatgagccactgcgcacggcactctaattccattcttaaccctacactcttctcaatgccatccccattccaagctctatcctgatcctaatgcctgatcctagagagttgtaactcacccaacctagaccaggaagccatcctcaaagccaactccaagttcaaatcgccaccaccctcttggcatctggacctaactccactgcagcctccctctggggcctgcaagcccaccttggtcttgatgcaggtgtccagggctgagtttctgatggccagctccatcctgagctgctccgcctccctcttcttctcttccagctccttggccaggttgtctcgttccttccgcagcaccgccttctcctccagcgctagctgggtctgccgggagcattcagcttggagcttggcctcccgggcctgagcctccttctccaccttctgtttcgcctcctgactggcccgcaggccctgctgggcttccagcttctggcgttggaggtctgagttctcgcgggccacgcgttcgatatccgcccggaggctccgggccagctcctccaccttggagctcatgaggctgggcatgtggtcgcaggctctgcggatggaggccaattccgagcccaggggatggtagaggttgtaacccaggttgtccaggctgcgtgggataatggagtccctccacaggttacgaaggtccatctcaaacttgtccttgtccaggggcaggcagagggcttgcaccttttgcagttgctccttggccagctggcgctcttggtgctgcagctcccgggttttcacgcattcaaccagctgttcctccgccacgcgtttgttcagcagcacgctttccttatccttagtgcaaatggtcttctccttggctatctccacctccagcgtcttcaccttctgattcagcatgaagagcaaggctaaggaaaacaggaccaggagacccaggaagattgggggctgccgagagcactgggcagggagtccaccaccccggctccctgcagccttagcactcaccatcgcagctcttgttcatgtccttgaattgatctctgcattgcttctcactcaagatgatggcagccatgtacctctgattgttcgtgtagatgacctgcccggaagataggggaaggacgcaggacagagcttagtgtcttgcccccaggactgcctggacccagatcgagcaccctggtggccagagtgagctgagttcacaagggcatggtccctttatgagggaatgttagaagccaggtgtggcagctcacacctgtcatcccaattacttgggaggctgaggtgggaggatcactcgagcccaagagtttgagaccagcctgggcaacatagtgagactcccatctcaataaaacaaacaaacaaaaataaataaacaaaaatatagtggatgtttgtctgatcttcaaaagcttttacagttactactatccagaaataaaaagacacaaagtataaatacatgctacaacatggatgaactttaaaaatattacatccacatttatggtcaactgaatttcttttttttttttttgaaatggagtttcactcctattgctgttgcccaggctggagtgcagtggcgcaatcttggctcaccacaacctctgcctcccagattcaaacaattctcctgtctcagcctcccaagcagctgagattacaggtggctgccaccacgactggctaatttgtttttttgtttttggtagagacagggtttcaccatgttggccaggctggtcttgaactcctgatctcaggtgatctgcccgcctcggcttcccaaagtgctgagactacaggcttgagccactgtgcccggctcgaattttttttttttttttttttttagacagggtctcactttgtcacccaggctggagtgcagtggcctgatctcagctcactgcaaccttgacctcccaggctcaagcaatcctcttgcatcagtctcccgaggagctaggactacaggtatgcgccaccactcctggccaattttttgtattttccttagagatgggggttttaccatgctgccgaggctggtcttgaactcctgagctcaaagaatccaactgccagggcctcccagccctgaatttttttgttttttttaaagagatggggtctcactctgttgcccaggctagagtacagtggagtgatcatagctcactgcagactcgaactcctgggttccagtgattctcctgcctcagcctccccagtagctgggactacaggcctgtgccaccacgcctgactgatttttaaatttttttttttttcttgagacagagtttcgctcttgttgcccaggctgaagtgcaatggcgcgatctcggctcactgcaacctccgcctcccgagttcaagcgattctcctgcctcagcctcctgagtagctgggattacaggcatgcgccacaacacccggctaatctttgcatttttagtagagatggggtttctccatgttggtcaggctggtcttgaactcccaacctcaggtgatccgcctatctcggcctcccaaagtgctgggattacaggcgtgagccaccatgcccagccttaaatttgtttttgtagagatggggtttcactatgtttaccagggtggtgacgatctcccccatcagcctcccaaattgctgggattacaggtgtgcaccaccatgcctggctatggtcaactgatttggacaaggatgctgctatgagctcaactgtatccccagtacctgagaatgtgactgtatttagaagtagggtttttttgtttttgttttttgtttttttacacagagtctcgctctatcacccaggctggagtacaatggctcgatctcagctcactgcaacctctgcctcccgggttcaagtgattctcctgcctcagcctcccgagtagttgggattacaggggcccaccaccctgcccggctaattttttttttttttttttttttttgagacggagtttcgctctttttgcccaggctggagtgcaatggcatgatctcggctcactgcaacctccacctcccgagttcaagtgattctcctg
